United States Patent Application Publication US 2022/0008368 A1 - sequence listing, part 21

SEQ ID NO: 2 - DNA, 58617616 bp, Homo sapiens (residues 43,420,461-45,591,483 of 58,617,616)
  modified_base (1)..(60000): a, c, t, g, unknown or other
  modified_base (24448981)..(24498980): a, c, t, g, unknown or other
  modified_base (24552653)..(24552752): a, c, t, g, unknown or other
  modified_base (24891257)..(24891356): a, c, t, g, unknown or other
  modified_base (24895791)..(24895890): a, c, t, g, unknown or other
  modified_base (24898314)..(24904771): a, c, t, g, unknown or other
  modified_base (24908590)..(24908689): a, c, t, g, unknown or other
  modified_base (27190875)..(27240874): a, c, t, g, unknown or other
  modified_base (58607617)..(58617616): a, c, t, g, unknown or other
atggagtcacaccaaactgccccttattttgttcctaaatatgtagctgcaaagatttagaagtctacacacctccccagcaggccttgctcacaatttggccacaaggaaattccttgtgggccccaagatctttaccctaaaacagttctgcttgagtttcaccctggcaatgtaattaacagtttatcttcacaggtactggacaagacaggaccagaagtcatccctctgctcacctgagacaaatgcctatttcactctttcctctactagatgtttagtttattttatgtaaaaatgcaaatctggccagacacggtggctcacccctgtaatcccaacactttgggaggccaaggcgggcagatcacgagctcaggagtttgagaccagcctggccaacatggtaaaaccccatctctactaaaaatacaaaaatttaccaggtgtggtggcagatgcctgtaatcccagctattcaggaggctgaggtggagaatcacttgaacccagaaggcagagattgcagtgagctgagatccggccatcgcactccagcctgggtgacaagagcaaaactccgtctcaaaaaaaaaaatgcaaattcactgagggcaagatgattgcatagttgactattcctctaccctctcctttcacatgtaaaatgtagattcactgaaagctgatcaaagcctcaaaagaatgcaaccactttccctttttatttactctcctcctttttttctttcctctttctcctattgcccactcctttccccactttaaatattgaagtccccaggccgggtgtggtggctcatgcttgtaatcccagcactttgggaggtcgaggcaggtggatcacctgaggtcggagttcaagaccagcctggccaacatggtgaaaccccgtctctactaaaaatataaaaaattagctaggcatggtggcggatgcctgtaatcccagctactcgggaggctgaggcaggagaactgcttgaacctgggaggcagaggttgcagtgagccgagatcatgccactgcactccagcctggcaacaaaagtgaaactttctctcaaaaaaaaaaaaaaaaaaaaaaaattgaagttcccaaatcctctttggaaaaagcacagatcacagatgttcctgtggttttgtgtttctttttcctgggcatgtcctaaaccttagcaaaagaaactaaaataattaagactcacctcaatcattttttttttatttataccactctcctgcagtttaagcgctactctagctaattccttatctttgtccttaggtagccagtccccattgtgtcagtttgctaaatctccctaaagaggaagaagaagcacacgaaaatcaaattttaactgagggccaggtgcagtggcccacacctatagtgccagcactttgggaggccaaggcgagtggattacttgagctcaggagtttgagaccagcctgggcaacatagtgaaaccccgtctctacaaaaaatacaaaaattaactgggcatggtagtgtgtgcctgtacatagtcacagctatttgggaggctgagacaagaggatggcttgacccagggaggtggacagtttgctgaggtcacgccactgcactcctcctccctagatgatagagcatgaccctgtctcagagacagagagaaagaaaaaggaagaaaggaagaaaaagaaagagagaaagaaaggaaggaaggaaggaaggaaggaaagaaagaaagagaaagaaagaaagaaaagaaaagagaggaaagaaagagaaagaaaaggaaggagtgacaatgccaaattctggagaggaattgagaaactagatctctcatatattgctgtaagaatgtgaaatggtgcacccactctggaaaatagtttggccatttatttaaaaactaaacacacacttaccatctacccagcagtcatactgctgagcgttcatccacaagaaatggaaacttaagtcaacacaaaatcatgtatgtgcttgttcttagcagctttatttgtaatagcccaaaatgaaaacaaccaaaatgtcttacagtaggtgaatgttaaactccacaatagaaagaaacaaactatttatacacacagaaacttggctggatctcaatggcattatgctgagtggaaaaaagtccatctcaaaggtcatatatgtactatatgaatccatgtatataatattcttgaaatggcaaaatcatagcaatagagatgtattttatttaactgaatggtatatccaaaatattaccattaaacatgtaatcaatacaaattttaatgagctatcttacattcttttttatactaagtcttcaaaatgtggtgtgtatttcacaatcatgatacatcttaatttggacttgttacatttcaagcattcagtatccacatgtggctactatatgatatagtggctactgtattgtacagcacagatctaaataacataaaatgcctcttcaaatggatggctcttttttatcgtgatgtttattttattattgagttttgagtatgtttcatatttgcatattacaaatgcaaattccttaacaggtatatcattttaaaatattttcttctactctgccttgtccttttcttctcttagtgtctttc[137 bp omitted]gcctcctgagtagctgggactacaggcttacactgccataccaggctaattttttgtattttagtagagatggggtttcactgtgttgtccaggctggtctcgaactcctgagctcaggcaatccacctgccttggcctcccaaagtgctgggattataggcatgagccaccgcacccagcagagcatgggtttttaatttaatgaagtccaatttatcaactttatgaaatatgcttttagtattatatattatacattagccaagtttgttattgcttgtttgtttgttgttgttgttgtcactgctattctaagtcgtttgcatttccaaatgaattttagaatcatcttgtcaattactacaaaaatcctgcaaggattttgattgggattgtttgaggagaattgacatcttaacgttaaggaaacaggagcataggagagccagggtgacaccattttaaaatcaaccctgtcgtaaaactagcaaggtacgctctttgccaatcacaacccacggtcataagatgtttacagctaaagaagcagtttattaatgcctgcaaggacaaactcctgtgacagaagaatgtccagatgtcccaatatcacataacaatatatactttcaagacagagtcatgctttggtgtacttatgcactaaaatgccaagaataacttttatttatttatttatttatttatttatttattatttttggagatggggtctcgctctgtcacccaggctggagcgcagtgacatgatctcagttcactgcaacttctgcctccccggctcaagcaatcctcccacctcccacccccaccctccagtagctgggactacaggcgagagccaccacacctcactaatttttgtattttttttgtagagacaggaccgcaccgtgttgcccaggctggtctcaaactcctgggctcaagcgatcctcccaccttggcctcccaaagtgctgggattacaagcatggtccactgcacctggcagataactttccttaaatcagcaaaataataaattttgtcatgctgtcagcccactcacacatagacataacttagcttagcttttatat[135 bp omitted]tgaccaacatggagaaacccggtctctactaaaaatacaaaatcagccgggcgtggtggcgcatgcctataatcccagctactcgagaggctgaggcaggagaatcgcttgaatctgggaggcagagtttgtggtaagccgagatcgcgccattgcactccagcctgggcaacaagagtgaaactctgtctcaaaaaataataataataatttttaaaaagacagcgcattctttctcttgctttctgaggcaaccctactgtgtaactaatgagcaactctgttgccaccgcactctgtgactcaccttgaattctttcttgcataagatccaaaaatcctctcttggagtctggatcaagacccctttttccagcgacattaataatactgtgtcttcttccccattcataccatatatcttttcatttatttcacaacagtgctgaaataaatgaaaagatatatgctatgaatggggaagaagacacagtattatttcacagtgtgaaatttccttcagcattgttgtgctgtttccagtatacaggtgttggcagggatatagaaaaactggaatgcatatattatgggtgggcacctgcatgagatcccaagaaacagcaactaggccagggtgactggagcagaggaaatgaggaagagcatcttaggagatgtggtcagaggtaacgggaatacagatctcagggagctcataggcaactgcactgactctggcttttatgccaggtgaatttggaagttgttagagagtttagatcaggctaggtgtggtggctcatgcctgtaatcaatcctagcactctgggaggccagagtgggaggatagcttgtgtccaggagtttgagaccagcctaggcaacatagcaagatcctcatttctacaaaaaatttttaaaaattagctgggcatgatggcatgcacctttggtcccagctgctgaggaggctgaggcaggaggactgcttgagcctgggaggttgaggctgaagtaagctttgatcccaccactgcactctgcctgggtgacagagtgagactctgtttaaaaaataaagaaagacagagagattgagggaggggagagagagagaaaggaagggaggaagggaggaaggaaggaaggaaagaaggaagggagagagggagggggcagtgcagagggagggaggggaaaagaaagagaagagaagagaaaaggaaaagaaaagaaagaagaaaaagttagtttatgtcagggtgtgatacgatgttttgacttctcttgtctaaggagccctctagctgctatgttgagaatagtctggaggaagacaaaattggcagtgggagacccactaaattgctgtttgccacgtttttaaaagctgaatagcttagatcagtagtttaggagatcgacaagacttgttttctggtcacaacgctgctgactaaaacaggatttagtccagacaggataaagtgaagaaactggacaaaaccagcagatgacagcaaaagtgaccctagctgccctcattgctcattagctcaagacactgcccccagcaccatgacagtttataaacgccatagcaacgacccagaagttaccacccatttctatggcaatgatctggaagttgctgcccttttcctggaaacttgttaaataactcactccttaatttgcattaatccacaccttaatttgcatgtaattgaagtggctataagagaatataaatgtagttgccaagggttcacaggttgccaactctgggcacactgccaatgagttatccctgctcagcaaggagcagtaccattcaataaaagattactgcctaatacccggggctcgcccttgaattctttcccggtcaaagccaagaaccctcccagcctaagcatcatgttgggggcctgtccatcctgcatcagtttttttgttttgtttttgttgctgttgttgtttgtttttgttttgttttgttttgagacagggtcttgctctgtcacccaggctggagtgcagcggcacaaacgcagctcactgtagcctctactttctgggctcaagtgatcctcccatctcaggctcctgggtagctgggcctccaggcacgcaccaccagagctggctaattttttttttaatttcgtagaaacagagtctcaccatgttactcaggctgtgctcaaacttctgggcttaagcgatcctcccacctgggcctcccaaatttctgggattacaggtgtgagccactgcactcagcgtgcatcagttctaactaccaaattgaaaggaacttagaggagaaaagagcatgttaaatgcctgtggggatggaactagcaaaatccagattatggaagctgcaagacaatgacctaactttgtcaaaacataaatttgagagaagaagaaaaaaaagtaagggaagctatagtttaagaggaacttaaacacacaaaatcaaatgcaatttgtggaccttgcttggatcctggcttgaataatcagatataaaataatacttttctgatacagctaagaaaatgcattcattgattatttaatgaggtaggtatcttaaattctattagatatgagaactgagatcatgtatttcaacatgacttacctgtttgtttgactttcaaaaaagccttgcctggaaggataagactgtaaaacaataaagaactcattgtttgcttcaggaaaataaaaaaaaaaaaaaatttatctaggcaaacaatttgctcacctgggcatatagctctcctctcaacacatggctcaactgggcaaaaagctcacttatcagacaatagtttgcttctcaagacttctctcaagacctccattctgttgtgttcaccaattctaaactatcgtctcatactttttatccaattttattttattttattttattttactttatt[246 bp omitted]aatacccttacatcattttcccctttgtgacactgttgagacaccaccgaactttgttctcccttgctgcaattggccttataaactcttactttgcgtgatcaatgggtttctctggtagtctttgcaagaaagtcaaccattaatagatacgctgatttcatgacatgtttattttaatttttttattttcttgtaactttatcgtcacagaatgt[133 bp omitted]gaaaccccatctccactaaaaatacaaaaattagccaggcgtggtgacgcatgcctgaaatcccagctactcaggaagctgaggcagtagaattgcttgaacccgggaggcagaggttatagtgagctgagattgcaccattgcactccagcctggggaacagagcaagactgcatctcaaaaaaaaaaaaaaaaggttgggggaggcttatctttttaaaactatatatacagaatggctgggcatggtggctcacatctgtgttcccagcattttcggaggcca[133 bp omitted]tgaggcaggagaatcgcttgaacttgagaggtggaggttgcagtgagccaagatggcaccattgcactccagtttgggcaacagagtgagattccatctcaaaaaaaaaaagaatatacatatatatatatatatataaaatctctacacacacacacaatacacacacagacacacacacacacacagagaaggatttacaaataaaatgaaataatgtctgagatttacttcaatacaatatggaatagagagtagggagaggcatagatgaagtgaaactggtcatcatttcgaggcaatcattattgaagctggttgacagctacatggggttcactataagacttttgtctggccagacgtcgtggctcacgcctgtaatcccagcactttaggaggccgaggtgggtggattgcctgaggtcaggagtttgagacaagtctgacctacatggtgaaacccagtttctaatttaaaaaattacaaaaaaattagccaggcctggtggcaggcgcctgtaatcccagctactccagaggctgaggcaggagaatcgcttgggctcgggaggcagaggttgcagtgagtcaagatcacgccactgcaatccagcctgggcaatgagagtgaaactccttctcaaaaaaaaaaaagctttttatctacttagatatatttctgaaacagtccataataaatgagttttatgtgtgctactcagaccacaacattggagttattcttgatctccctctcctatcccatatccaatcctttagcatatcctgttgattctgcctttaaaatacctctagaatctgaccatgtctcataacctccgctgcttcttctccagtccaagctgccaccatttctcaccttgattattgcaacagccaagagtctctatgctttgacctttcccttcccacaatcccattctcttctcgacttagcagccacagtgatccttttttaaagtaagcctaaaccctgtctcttagccaggcatggtggtgcacacttgtagtcccagctactcaggtggctgaggcggaagaatcgcctgagaccaggagttcaagactgcactgagctatgattgcgccactgcactccagcctgggcaacacagcaagaccctgtctcaaaaacaaaataataaagaaatgaagaaataaaaaataaactcgctctctatcaaaaccctacaatgactctccacctcactcggagtaaaaaccaaagcccatggccaggagcggaggctcactcctgtaatcccagcagtttgggaggctgaggcatgaggatgacttgaggtcaagagtttgagaccagcctggccaacatggagaaaccctgtctctactaaaaatacaaaaaattagccaggcattgtggcaggcgcctgtaatcccagctacttgggcaactgaggcaggagaatcgcttgaacccaggaggcagaggttgcagtgagccgagatcgcgccactgcactccagcctgggtgacagagcgagactctgtctcaaaaaaaagaaataaaaattaattaaataaaaataaaaattatcctaagggaagagagatggggccctgatacagaagtgcacagccccagacaccctcaaagccagcatggtctctgtgaaagatgcaccctacagcagaattctgtgaagggttcctgtggggcagtgccccccggtggacaatgacctttagacaaaggcattacctgtaaatgatctagtgtgctagaaggaaaagacattcaatttccatccctagaaatccaggaaatgcaaactaagacaacaataagttgcctgtcaactttataaacaaaagaaggaaatagaaactttgttcaaaacaaactttgaatgcagtgtttcactttctgggcatgtctcaagacaaaagactttctttctctttttttttttctttcagacagtctcactctgtcacccagcctggagtgcagaggcacgatctcggctcactgcaacctctgcctccaagtgattctcctgcctcagcctcctgtgtagatgggcttataggcaaatgactttctttagaagaccagaattggctgggcatgatgactcacgcctgtaatctcaggactttgggaggccaaggcgggtggatcacctgagctcaggagttcgagaccagtctaggcaacatggcaaaatcccatctctactaaaaatacaaaaattagctgggcgtggtggcaggcacccataatcacagatactcaggaggctgacgcatgagaattgcttgagctcgggaggcagaagttgcagtgagttgagatcacaccagtgcactccagcctgggtgacagaatgagaccctgtctcaaaaaacaaaacaaaaaaacaaaaactacaccatggaatgaaaatggaaaaaatgtttcctggtacctcctaaggctaaacatatgtatctcctatggcccagcaatccacatctgggaatatacccaagaaaaatgattgcatgtctacgtacacgactgcttctagcaactctattcatagtagccgaaaatcagaaagagcccaaatgtccatcaacaatacatttgaataaataaacgtggtatagtcataaaatggaatgccacacagcaattttaaaaaataacagcacatggaccaacatgcaacagcatggtcaaatatcatgacataatattgagtgaaagaagctagacactgccagacgcagtggctcacgcctataatcccagcacttcaggaggccaaggcggatggatcacgtgaggttgggagttcgagaccagcctgatcaacatggagaaacccatctctactaaaaatacaaaattagccaggtgtggtggcgcatgcctgtaatcccagttacttgggaggctgaggcaggagaatcacttgaacctgggaggcggagtttgcggtaagccaaggtcgcgccattgcactccagcctgggcaacaagagcaaaactccgtctcaaaagaaaaaaaaaagaagaagaagctagacaccgccagatgcaatggctcacgcctgtaatctcagcactttgggaggccaaggtgggtggattacttgaggtcaggagttcaaaaccaccctggccaacatggtgaaacccgtctctactaaaaatgcaaaaattagccagacagggctgggcgcagtggctcacacctgcagtcccagcactttgggaggccgaggcaggcggataacgaggtcaggagatcaagaccaccctggccaacatggtgaagccccgcctctactaaaaatacaaaaattagctgggcgtggcagcgcgtgcctgtagtcccagctactcgggagggtgaggcaggagaatctcatgaacccgggaggcagaggttgcagtgagctgagatcgcgctactgcactccagcctggcggcagagtgagattctgtaaaaaaaaaaattgccgggcgtggtagtgcatgcctgtagtcccagttacttgggaggctgaggcaggagaatcacttgaacccaggaggcggaggttgcattgagctgagatcgcgccactgcactccaacctgggtgacagagtgaaactccgtctcaaaaaaataaaaaataaaaagaaatgaaaagaaaagcaaagaagctaagccgggtgtggtggctcacgtctgtaatcccagcattttgggaggccaaggcagatggatcacctgaggtcagaagttctagactagcctgaccaatatggtgaaaccccctttctactaaaaatacaaaaaaaattgctgggcatggtggtgtgcacctgtagtcccagctacttggaaggctgaggcaggagaattgcttgaacccaggaggtggaggttgcagtgagccaagatcgcaccactgcattccagcctgggcgacagagtaaggctccatcaaaaaaaaaaaaaaaagaaaggaaagagaaagagaaagaaagagagagagagacagaaagaaagaaagaaagaaaaagaaagaaagaaagaaagaaagaaagaaagaaagaaagaaagaaagaaagaaagaaagaaagaaagaaagaaagctggacaccaaaagaaaagaaagaagctagacataattgtatatgcattttatataagcattaggaacaggcaaacctaacttgtggtgacagaaatgagaaaatggtcacctctgcacgctattgggtgggagaatgcacaaaggaaccttctaatatgacgggaatgctctatatcctgacctaggtggtggttacaaagatatgtacataaattcattgagctttatacttcagttttatgctgtaagttatctccattttaaacgttaaatttttaaagtttgaaataaaacagaatagaatcaacaactagtgtatcagtactttcaagatacgcaaaggatcagaatgcaggaccagcctggtggagaatacactggggtggggagaacagggccccaggtgctcacattccctctccagccacaagggggctctccccacctcagctctctacagccaaatcctctggaaaacccagccgcacatgacctcgcctattcagaaatgtcactgctggctgggccaggtggctcacccctgtaatcccagcactttgggaggtcgaggtgggagactcacttgagtccaggagttcaagaccagtctgggcaacatagtgagaccccgtctctacaaaaaaatagaaagagaaatacaatctcatgattcaaatatacaaccattgcggaaaactgtcagtatttagcataaacatatgcataccttatgaccttgcccttcaggtcctggcctacatacccaacagaaatgcatacatatgttctccaaatgacctgtacaggaatgttcctagcagcactatttgtaattgccagagatcggcagcaacccaaatgccctcaacagttagaatgaataaataaatcacagtggaatgctatatacatcaatgagaatgaatgccatgcaacaacatggataattctcataaaggcaggcacagtgactcaacgcctataatcccagcactttgggaggccaaggtgggagaattgcttgaacccaggagttcaaaaccagcctgtgcaacaaagtgagacctcgtctctacaaaaaataaaataattagccagccactaattattgctgcatcaatggcacaatcataattggactactgcaacacagcagaaaagaccgcaggctccctagacagactgcctgggtgtgagtgcagccttggctggctgtgtggtcttagacaagctacttaacctctctgtgccccagcttccccatctttaaaatgagccagctgggcacagaggctgatgcctgtaatcccagcactttgggagaccaaggtgggcagatcatgaggtcgggagttcgagaccagcatgaccaacatggtgaaacctcatctctactaaaaatacaaaaattagccaggcatggtgatgcgcacccgtaatcccagctactcaggaggctgaggcaggagaatcacttgaacctgggatgtggaggttgcagtgagccgagatcacatcattgcactccagcctgggtgacagagcaagactctatctcaaaaaaaaaaaaaaaaaaaaaaaaaaaagcctaattatagcacctacctcatccagttattgtgaaaattaaatgaatgattatttgtagagcactgagaacagtggccatgtattccatgagtgttacatgactgttttactataccctggtattggacactgagatttttctaatcattttatatttcagacaatgctgcaacatacacccttataaacgtatcatttgccacaagtgtgagaagtggaatagtgggatagtgggattggtgaaccaaagagggtttgtgctggttacatgaagagatgtcaaatttgtctccattaaagttgtaccaatttacactcccaccacaatgaaggagagagctgatttctcaccattaccctggttgtggtgatggtttcacaggtgaatacatacatcaaagctcatcgctgtatacctcaaatatgtgcagcttttgcatatcaattacacctcaataaagctattttttttttttgagacagagtttcactctcgtcacccaggctggagtgcagtgtcatgatcttggctcactgcaacctctgcctcctgggttcacttgactctcctgcctcagcctcccgagtagctgggattataggtgcctgccaccacacccggctaatttttgtatttttagtagaaatggg[135 bp omitted]atggtctcccttttgagaaacacgtagtggagaaggatgataaatgattcaactgggatgcagccagcaaaatcccagatgttgcaaaccctatgagaaaaaggaccctatttattcagcaaacgtactgtaagagaagggagtgaggaagagggagaatccaaaaattaagacagaattaagatactgatccatgaaatgcaatgtgtagatctttgtttctctcatgagttgaataaaccaactgtgcaagaaatgttttatggcggggtgtggtggctcacacctgtaatcccagcactttgggaggccaaggagggagcacctcttgagcctgggagttggagacaagcctgggcagcacatgaagaccatctctaaaaaaagaaaaaaataagtaacccagacatggtggtgtacctgcagtcccagctacttggaaggctgaagcaagaggattgcttgagcccaggaggtcaataggctgcagtgaaccatgatcacaccactgcactccagcctggataacagagtgaggcactgtctcaaaaaaaaaaaaaaaaaaaaaaagaaggagtatttatgagaccccagtcaaatttaaggcactgaccagatagttaattatattaacaagttattaataacttttagatatgataatatattatggtcattttcttttaagagttcttataagatactaaagtttttgtctcctcattatgtagcagtgaaatgatatgtttggggttgatctcaaattaattggaaagatagatgaaataagaaaagctgggtggttagggaggatcacttgagctcaggagttcaaggctgccatgagctatgattgcactactccagcctgggcaacagaacaagatgaaagaaagaaaagaaaaagaaaaagggaagggaagggagaaagagagaaagagagacagataaagaaaaagaaggaaggaaggaaggaaggaaaagagagaaagagagaaaaagagaaagaaatggctgggtgccatggctcacacctgtaatcccagcacttcgggagaccaagttgggtggatcacttgaggtcaggagttcaagatcagccaagccaacatggtgaatcccggtctgtcctaaaaatgcaaaaattagccaggtgtggtggcgtgtacttacaatcccagctactcgaaggctgaggcatgagaatcgcttgaacccaggacaaggaggttgcagtgagccaagatcctgccactgctctcccgcctgggtgacagagtgagactctgtcaaacaaacaaataaacaaacaaacaaataaataaatctaaaaacgaagaagaagaaaagagaagaaagaaacactgctctgaatctcttcctgctcttctccctccacatacatacctgcctcgaggttggtggagctctgtgtggtctccttttaggggtaagcagggggcaatttgagaactgagatgcttcaagttattccccaggcagggtttgggttcccccagaaggatgttagcctgaaaattttaaaagacatggcacaggtcagggattcccagggttttgaccccaatggggacacacaacaccctgaaaggggaccaacttcttccttcacagagccctggaaacacatcttagctttctggaaacttcttaagattctctaagtccctccaggaaatttggaaaaattcgtcctcatcaaggccatgcttttggtgtatgtaggtttcagccactttggtggatctgtactgtctcgagtcaactaaacgggtgtgggcggaggattacctaggtgccgaggcaagagactgaaggcacaaactgtttcagtataataaaaaaaaatagttagaataagaatagtcgtaatacaaattagagatagagatggtcatggacaattatcaatcattattataaacatttatcattagcttttaatattactcttcgttgcattactaatataacctaggaataaccggcgggtatacggtcaggtgctgaagggacattgtcagaagtgacctagaaggcaagaggtgagccctctgtcacgcccgcataagggccgcttgaggactccttggtcaagcggtaacgccagtgtctgggaaggcacccattacttagcagacagcgaaagggagtctcctttccttggaggagtcagggaacactctgctccaccagcttcttatggaaggctggatattatccaggcctgcgcgcagtcatccgaaggcctaaacccctccctgtagtgctgtgcttcaatggtcatgctccttgtccactttcatgctcctcctgcactcctggctcctctttgaagttcgtagtagataagggtagaagaaatagtgaaagtcttaaagtctttgatctttcttataagtgcagagaagaaaacgctgacgtacgttgccttccctctctctgcttaggctacccaagagggaagggcccccgtcctatgatcacgtgacttgcttcaccttgtcaatcacttagaagattcaccctccttaccctgcccccttgtcttctacgcaataaatatcagcgagcccagccttttggggccgctgccggtgtccacgtcttgatggtagtggtcccctgggcccagctgttttctctttatctctttgtcttgtgtctttatttattacaatctctcgtctccgcacatggggagaacacccgctaagccccgtagggctggcccctacaaggcagccttcagaaaggccaatggggctgaggaactgaagccttctaccaacagcaggcacagcctgccagtcatgtgaaggagccatcttagaagcagatcctccagctccaattgagcttccagatgactacagcagccccggtccacgtcaatcgataaatcaataaatgcttattagggctgggcatggtgacccatgcctgtactcccagcactttgggaggcagaagcagcaggattgcttgaacccaggatttcaagaccaacctgggcagcatagtgagacccccaactctagaaaaaaattttaaaattagccaggcatggtggctcatgcctgtaatcccagcactttgggaggccaaggcaggagtattgcttgagcctaggagttcaagaccagtctgggtaacacggcgagaccccatttctatttttttaataaataaaataaaaataattttaaaaattagctgggcatggtggtgcatgcctatagtctcagctacttaggaggctgaggcaggaggatcacttgagcccagcaggtcaaggctgcagtgagccatgatggtaccagtgcactccagcctgggcgattaaccaacattccaaatgcatcctcaggaacaataaatctctcaaatattgcctctacaggggaaaaaacccaaaggtccttaatgatgactcagagggaaggttgaaagatgcttatcggagagtttgagttatatatccatctgtctatctatgtattggggttcaccaactgtaaaagcatcgttgctattacagatataaggcactccaagcccaagagccctgagggtagggaggttactccagaagatcaggaaccaggaaacgcccacacccacagtaacggtaagaatgacagctgcagaccagaccagccctctactgtgatgctggagagatgagacccagctgggatccctggctcaggccctcatgccaagacagctgtctctaatctgccggtgacagcccagccagcccattctactcagggaaatcatctggaatcatctgggtctggttatttttcacaagcagccaaaatcctgggaaactggtttgtacaaaccactaaatttccctggcttataaaatggcaataatcacagtctggcttcatagagctgtcatgacaattaagtggcttctgcaaatcacgtacatggaaccaggatggaatccaggtctatgaggcgcacacgagaaaagattttgaaatgagctccaaaggtcttgagatgcatgaaaccctcattatctgcacctttatttacaaatcaatgcttaacggagctaaaggcaaatcttcattttaagattaagaaagattaagattaattaagaaaacatagacatataatgaaaagatacatacatatatttaaaaaaacaaaaacaaaaactgataatgcagtgactaagagcaaataatgcaatgactaagagcaaataacatcaaatcattcacttctcatcaaccagcaaatgtgaatgccttcaaagcttcctgccaacttcctctagacaaccacacccaaatggcaaatgcagacacaacagcttctttgcttgactactctctcctacttcatttccgttctccccaccccctaccccgccccccccccccccgccgcctccaccccggcccccgccgccaaaaccctgtgcatcctgaacctgggagcgtcctttaaagaagccatacaagggagctccctgaggtcctcccctaaacggcctctgactctcctacctggaagcagagcccaagaactttgagctgatgagaggactctgggcttggccgtgtatgggaaagcagcctgttgcatgtcaagagtgacgccatcttgaagcaaaaccgccgtgattggttttgcagaccaacctgttgcagaccaacctggaatagctgacagctgagttccagacatatgagaaggtacagatgacccagaagaaccatccagccaagcctagctaaatgccctacccacaaactcagaagctaaaaaaacatgctactgagctttggggtggtttgttacacagcattattgtaactaaccaatacaagaaacctgcagctgctcagccaaatcctgaagctagcctgcttggatttgaaacccatctccattacctgtcagctgagtgacttaacttccctgagccttagatctctcatctataaaatgggataagagcaggtctaacccaacaagatggttccatcattcaggaaacaacagtttatggggttcctcttgctctgtgtgagaaagagacaacaatgaccaagacagactaggcatgatggctcacgcctgtaaccccagcactttgggaggccaaggtgggaggattgattgagcccaggaattgaaagccagcctgggtaacatagcaagaccccatctctaaaaaaaaaaaaaaaaaaaaaaattaagaacctgggaggccgaggttgcggtgagccgagatcgcgccaatgcactccagcctggaggcgagagcgaaactccatctcaaaaagaagaaaaaaaaaattaaaaattagccaggggtggtagctcatgcccatagttccagcactttgggaggtcaaggtgagaggatcacctaagcccaggagattgaggctgaagtgagctatgatcacaccactacattccagcctgggcaacagagcaataccctgtctgtaaaaaaccaaaacagtgaccaagagaaagttccatatgcataaaaagcaaacagatctacgatatgaagtcaggtagagagaagtaagtgctctgaagagaagcacaactgactaaaggacggaggctgtgatggggagaggagatactgctttcgataaggtagtcagggacgcccaccaaaaggagatgacatcccagccacgtgtgaatgaagagaccatgagggaggttttcccagcagagggaatggtggtgccaaggtgtagaagcgggcatgagattggtgtgtgtgagcaatggaaagaaggctggcaagaagaggcaagtggcagaatggcaggaggcggcatctaagaggcaggcacagatcagagtatggggataatggatttaggaagttttttgtttgtttatgtttttgtttagagacagagtcttgctctgtcacccaggttggagtgcagtggcgcgatcttggctcactgcaacctccatctcctgggttcaagtgattctcctgcctcagcctccagagtagctgggattacaggcatgcaccaccatgcccggctaattttttgtatttttagtagagacagggttttgccatattgcccaggctggtctcgaactcctgaacgcaagtactccacccacctcagcctcccaaagtgctgagattacaggcgtgagccaccgtgtccagccatttttttttttaaggcagggtcttgctctatcgcccaggctggagtatagtggcacaatcatggctcactgcagcctcaacctcctgggctcaagctattctcctgtcttagcctcccacgtagctgagactacaggcacaggccactcctagcttggagtgtggattttattgtgattaaattagttgtcaacctagataacaaacagcgagaggctct[132 bp omitted]tctactaaaaatacaaaaattagccaggcatcatggcaggtgcatgtaatcccagctgctagggaggccaaggcaggagaatcagttgaacccggggggtggaggttgcagtgagccaagttcatgccactgcactccagcatgggcgaaagagtgaaactacatctcaaaaaaaaaaaaaaagtttattcaagaacagagaattgcaatgggaataggagtgttatacatattcaaggaggtcaaagaagacaaaggtttttaaagaaaaaaaatgaggagaattacataatggttttgaaataatcatctttggctagaaaaatgaatcacaaagatgatgccagtctggggttggacaggcagttgctgggcaaacgtccttgcagaagtatttttctgtgtaagtttgcaatggtctttgtgtgagattgtgttttttgcagtttttttgtgatagtttttgtgatcagtcatacaagtatgagaaccctctctccatggctttccttcactctgttggtcggagcttttttttctttttcttttttttaacatgagtgactccattttgattctgataaccttcaaaagttcatatgtgcctgggtcatggggactgcttagtaaatgctagctttcactttactattggaatttttacctccaaaatgcagcatctccccattccaaggtcctaagtagaatggaagaggagatgccagggaatcttgacaagggaaactttcacggttgactctacatttgaatttctatagcaggattaagtctgtgtattatttacgtgatttaaaaaggccgagtgtggtggctcacgcctgtaattccaggactttgggaggctgaggcaggtggatcacctgaggtcaggaatttgagaccagcctggtcaacatataatgaaaccccatctctactacgaatataaaaattagccaggcatggtggcatacacctgtaatcccagctactcaggaggctgaggcaagagaattgtttgaacctggg[139 bp omitted]ggaaaactaaggcagaaggatcgcctaagcctaggaggtcaaggctgccatgagctgcgatcacaccactgcaccccaggctgggtgacagagcaagaccccctctcacaaaaaaatttttaaaaagataatgttaaatatatgttagtagataaatgttcacaaaaatcattagtgttgaaggaagtgaggaaaagattaaagggtgtattagtccattctcacactgctataaagatactacctgctataaagatactggccagacaaggtggctcatgcctgtaatccctactctttgggaggctgaggtgggtagatcacccgatgtcaggagttcaagaccagcctggctaacatgatgaaaacccgtctctactaaaaatacaaaaaaaaaaaaaaagtcaggcatggtggcaggcacctgtaatcagctactcaggaggctgaggcaggagaatcacttgaatccaggagacagaggttgtgagccgagatcgcactactgcactccagcctgggcaacaagagggaaactctgtctcaaaaaaaaagatactacctgagactgggtaatttataaacaaaagaggtttaattgacctgcagttccacattgctgaggaagcctcaggaaacttacactcatggcggaaggggaaggggaagcaagcaccttcttcacaaggtggcaggagagacagtgcaggggaaacggccacttataaaccatcagatctcatgagaactgcatgggggaaccacccccaagatcgaatcacctcccaccaggtccctccctccacatgtggggattacaatttgagatgaggttttggggggacacagagccaaaccatatcaccagggttaagatttataaattgctctgtgaaccccgaaaatctgagacaggtctcagttaattcagaaagttaattaggagaccaaggttgagaatgcacgcacatgacacagcctcaggaggtcctgatgacacgtgcccaaggtggtaggggcacagcttggttttataccttttaggaagacatgagacatcaatcagtaggtgtaagatgtacattggttcagtccagaaaggtgggacaactcaaggtgaaggcaggaaactggaagaaaggagggggcttccagatcataggtagataagagagaagtggttgcattcatttttttgaaatggagtctcactctgtaacccaggctggagtacagtggtgctatctcggctcactgcaacctccacctcctgggttcaagtgattctcctgcctcagtctcccaagtagctgggattccaggtgcccacgaccacacccagctaatttttgtatgttttagtagagcaagggtttcgccatgtcggccaggctggtcttgaactcctgacctcaggtgatccgccagtctcggcctcccaaagtgctgggataacaggcatgagccactgcgcccagccagttgcattctttttgttttttgttttttgttttttttttttttgagacagagtcttgctctgttgccctaggctggagcgtagtggcgcaaccttgtctcactgcagcctctgcctgctgggttcaagtgattcttctgcctcagcctccagagtaactgggattacaggcatgtgccaccatgcccggctaatttgttgttgttgttgctgttgctgctgctgttgttgttgttgagacggagtctcactctgtcatccaggctggagtgcaatcgtgagatcttggctcactgcaacctccgcctcccgggttcaagctattctcatgtctcagcctcccgagtaactgggattacaggcacccaccaccacgcctggctaatttttgcatttttagtagagacgggggtgtcgctatgttgaccaggctggtctcgaacccctgacctcaggtgaaccatccgcctcgaactcccaaagtgctaggatgacaagcataagccaccatgctggtagttgcattcttttcagtttctgattagcctctccaaatggggcaatgagatatgcatttatctcagtgagcagagcggtgactttgaatagaatgggaggcaggttcaccctaagctgttcccagcttgacttttccctttagctttggtgattttggggccccaatatttattttcctctcacagctcagaactgtgcttggtgccatgagtgtttgtcgcatagctgttggtaaatgcaggatgggcattgcaggcagaaggaacaggaagtgcaaaggttctgagaagggaatgggtctctgtggctaaggctcatccaggagacctgcgtggctgcagcggagcaggcagtggttagtgcaagaagttgcggccagcacagcggtcagggccagaccctgtgggcatgccaagggcacagtgcttccgctaaatgagaagagaagccactggagtgtttcaaaagttaaccattattggccaggcatggtgactcatgcctgtaatcccaatgctttggaaggccaaggtgggagaattgcttgagcccaggagttcaagaccaacctgggcaacaaagtgagaccccatctctacaagaaattagacaggtgtggtggcacacacctgtaatcccagctactctccaggctgaactgggaagatggcttgagcctgggaggtcaagactgcagtgagctatgatcacgccactgcactccaacctgggtgacagagtgaggccctctttcaagaaagaaaaaaactaataataatattgttcaatgaaatttaccagaggccactagtttggaccaagcttctgtgcaaagcccaacagaccaaaccaaaatggagtcactcgtgctaacttccacatcaccaagccaaaactcaattgttttacctgaccttccaaaaaatcaggagagtgaaagataacagccaagtccccaagcaggccagttttagcctgcatgataaggaaacccctgtcctttaacctttacaaggaaagtaattttgaaatggccaatacactttttcttctctgtttctgcagtctctgccctttctgtctataaaaccaacctcttttgctcgactcatcagaatactcattctgtctcttataattcgatgttgcccaattctaaaatcacaaataataaccagttaagatctttaagcaggctgggcacagtggctcatgcctgtaatcccagcactttgggaggccaaggcaggtggatcacttgaggtcagtagttcgagaccagcctggccaacatgtatcttttgtaaagacataaaaattagccaggcatgatggtgcatacttgtaatcccagctatttgggaggctgaggtgggagggaatctataagcaaatttgttgtgattttgtcttttgacagttcaaggactgaacactttctcttttttttttttttgagacagagtcttgctctgtcaccaggctggagtgcagtggggcaatcttggcttactgcaacctccacctcccgggttcaagcaattatcttgcctcagcctcccgaggggctgggattacaggcacctgccaccacgcctggctaatttttgtatttttattagaggtggggtttcaccatgttggccatgctggtctcgaaatcctgacctcatgatctgcctgcctcagcctcccaaagtgctgggattacagtcatgagccaacacgcctggccggactaagcactttcacctttattcttttctgtctccaaactcatccacaatctcacccagcttggactcacccctggcagttcatctccaccctgaccttgctttagcaatgatctttcatttcattcatcccttcttttggggcctttccatgactctagactctgagggtatacaatagtgagcaatgcagactcagatcctgcccagaacattccctaacacacagtaggtgttcattaaaagcttttagaatgaataagaatagttgtttttttaagaccctactaacaaaataaaaagttgacatccttaatgcttgaccctccaattttgtctttgaagcttgatggttcacaatctccaaactggtttacagcacaaagtcccaatgccaaggttctttcccaaatgggcctgacctaattccccagcctcatctccctgctctctcccaggttgctgcacccagttccggacacaaggcatgttcgctcaggcctctgcacgtgctccttgttatttaagatcccgctcctggtcttatccatcacgacctctgagaagatgtcctggaaacccagacagagctttgtccctgtgtctgctgcagatttaggtgaatgttggtgcaagtgcattcgccaaatagcagtagtactttccgagagtccagccaggggctggatgctgatgcttagctgacattgctgctccaagccgccagagggcgcatggaaaacaccaatctgacttgcagggtgaaaaccctacaggagctcccagtttctcgtataattaacagttaaggtgccactgttcttgttttgtttgtttgttttgaggcagggtcttgctctgtcacccaggctggagtgcggtggcgcaatctcggctctctgcagcctcgtcatcctgggctcaagtgaacctcccaccttttgacacagaaaagttggcttatcagtggttcattttgttaacccatgttcatgagtttcttgtgatgtgctaatttactgctgatatttaggatagtcctgttgatcctaataaattcctaattgttgttcttgtttcatcggttcaccgtgaaccagtggatgttgtctcactcttatccctgatgcacactggcacttttatatgaagtgcccttgatgacactagtgatgatggttgtcactagagtggtacttgcattctggattatcttactgcactttagcttgctaggtgagcactcaaactccctagtagctgagaccacaggtgcgtaccactcagctaatttttgtattttagcagagatggggtctcgctatattgcccaagctgggcagactcatgggctcaagtgatcctcccatctcagcctcgcatagtgctgggattacaggcatgagccaccgcgccccaccaagatgccactgttttttgtttgtttttctggggcttggggggcttttttgttttgtttttttgttgtggggggagttcgagacagagtatcactctgttgcccaggcaggagtgcagcggcatggtctcggctcactgcaacctccgcctcctgggttcaagcgattctcctgcctcagcctcttgagtagctgggattagtcaggcccgccaccaggcctgactaattttttttgtatttttagtagagatgggttttcaccat[140 bp omitted]aggtgggacttgggtatgggaccaaattgaggactagctaagcagtttcccataatacacgcccaccagtatgccacgtcagtttaccgttgccatggcaacacctgggagttactgcccctttccatgccaataaccccacaagccaaaagtcattaccccttccctagaaatttctgcataaaccgcgccttaatctacatgtaattaaaagtaagtatcgggctgagcacactggctcacgcctgtaatcccagcattttgggaggccaaagctggcggatcatctgagtgaagagtttgagactagcttggccgacattgtgaaaccccatctctactaacaatacaataattagccaggcgtggtgacgcccgcctgtaatcccagctactcaggaggctgaagtaggagaattacttgaacccaggaggcggaggttgcagtgagccgagatggcgccactgacagcactccagcctgggtgatagagagagactgttgtctaaaaaaaaaaaaaaaaaaaaaaaaaaaaaggagtctatttacaagggtggaggcagtgggtagaaagatacaggcagcccaaggcaaccgtacatcaagaagggagttggggaaataaatacccaccctccagtttcttgccagtgtctccccattgggcaaaccgatgcagaaagctagaggttcagaaagctcattgtggttcatgctgatcccaaggtatggtcagactcccaggagtatggcggggagaggtggagagtggacctgaagaggcaaacaaaaaatatccagcatagtccgggcacagcagctcacacctgtaattccagcactttgggaagctgaggtgtgaagatcacttgaggccaagagttcgagaccagcctggacaacataatgagactcatctctacaaaaaaaaaatttttttttaattagcctggcatggtggcatgcacctgtaattccagttatttccaaggctgaggagggaggatggcttgagcctaggagtttgaggctgcagtgagctatgattgtaccactgcactacagcctgggcaacagagtgagaccctgtctcaaaaaaaaaagggaagaaaagaaaaaagaaaaacatccagcatagtgttctatttgtattgttattgtatttcttattgtggcctatgaggcccttcaaggtttaggcctaacctctgcctcctcttcccaccccacccactacattcctctctgaaacccagggactgactgggaagggatgggagacaaccttctggagtgatggtgatgttctgattcaagataaggattttggcggcacgggcctgcacatttgtcagaattcctctaacaatgtgcttaagttttgtgcatttcagcatatgtaaattttacctgaagaggagaaactaaataaatatgcttttcaacttactttgaaatgcattgaaaaggcaagaaggagtgatggatagatggatggaaaggtgggtaaatacttgataaagcaagttgagtaagatgttaattaatttagaatctaggtgatggggccaggcacggtggctcatgcctgtaatcccagcactttgggaggccaaggcaggcagatggcttgagtacaggagttcgagaccagcctgggcaacagggcgaaatcctatctatctctacaaaaaaaaaattagccaggcgtggtggcacatgcccctagtcccaactactcaggaggctgaggtgggaggatcacctgagccacagaagtcgaggctgaagtgagccaagattgcaccactacactccaggctgggctatgggagtgagaccctgtgtccaaagataaaataaaaatagagctgggcacggtggctcacccctgtaatcccagcattttgggaggccaaggcggatgaatcacttgaggccaggagttcaagaccagcctgcccaacatggtgaaaccccatctctactaaaaatacaaaaattagccaggcgtggtggtgggcacctgtaatcccagctactcaggaggctgaggcaggagaatcgcttgaacctgggaggtgaaggttgcagtgagcccagatcacaccactgcactccagcctgggtgacaaagtgagactctgtctcaaaaataataataataatcatacaaatagaatctaggtgatgggtatatatgagtgttcactgtaagattattttaacttctctatgttttaaataattcattttaaacatctgtgcaaaagtaaaaataaaaatttgggaaagtgttgagtcagcaaaggaatttggattggattgattggttggaggaaccaagaagaaatgaattgctctgggactttccacagaaaccacaaccgcttccctgcagcatagagctggcctccaggaacaaactgtgccagctctcaagtctcagttctccagaaagcctgtcaggaaaaaagtgcagagaagagaaagagacagcacccttgcttctcagaaatcctgtgatgaacagatctgcctaacatctgaagtcatgcactattcattcgacaaactataattgaaaccctcctctgtgcccagccctgagatgtgtgtgtggcactgacaacatagccccagcccttccctcaggagactcaaagtccaggggcagagacagacacatcttccagtgttatggtttggctccatgtccccacccaaatctcatctcaaattgtaatccccatgtgtgagggaatgacctggtgggaggtgattggatcatggggacggtttctcacatgctgtttttgtgctgatgag[224 bp omitted]gaggc[169 bp omitted]tttctctgctgccgccatgtaagacatgccttacttcccattgaccttctgccataattgtaagtttcctgagtcctcctcagccatgcagaattgtgagtcaattaaacctcttttcagtccaggcgcagtggctcaaacctgtactcccagcactttgggaggccaaagcaggcagatcatctgaggtcaggagttcaagaccatcctggccaacatggtgaaaccccatctctcctgaaaatgcaaaaattagccaggtatggtggcggacacctgtaacctcagctacttgggaggctgaggcaggagaattgcttgaacccgggaggtggaggttacactgagccaacttctctctactgcactctagcctggacaacagagtaagaccttatattaaaaaaaataataataaataaaggccaggcatgatggctcatgtctgtaatcccagcattttgggaggccgagccaggcagatcatgaggtcaggagttcaagatcagcctgaccaacatggtgaaaccctgtctctactaaaaaatacagaaattagctgggcatggtggcacacgcctgtaatcccagctactcaggaggctgaggcaggagaatcacttgaatccgggaggcggaggtttcaatgagccgagattgtgccactgcactccagcctgggcaacagagcaagactgtgtctcaaaaaaaataataaattaaaaaaataaaaacctcttttctttatcaattacccagcctcaggtagaatctttatagcaatgtgagaccagaccaatacatccagatagcaacaatcccaagtgatcaaaacaataatgggggaagccccaaatgaggcatgtgacccagactggtggtcaggaaagatacctgatggagaggacatccaagctaagtcttaaagaaagagtaggtgtcaccaggtagagacggaaggacaatggaaaagcattccaggcagaaggaacagcaactgcaaaggtctgggagtgagcagaagagtttgatgctcaaacttttctgaactgaacttttctgaactgaaaagttcagtgtcattggaatgtgaaaggaagcagagggtagggaggggttaaaggcaagcatgcagcagtcaccagttcctgtgtgggcttgtaagccatggtagggcattggaatcttaccctgcgagtgctggggagtcacaacagggttatagtcagtaggaggacttcaccagtttgtaaatgattccaattgcaaaacaagggaaggagatgagggaatgtatcggtcaggattggctaagttatgctgcagtgacaaacagctccagaattcagtgactcaaaacaacaaaggttggctgggtgcagtggcttacgtctggaatcccagaactttcagaggccaaggagggagaagtgcttgaggccaggagttcaagaccagcctgagcaacatagtgagattccatctcttcaaaaaaaacttttaaaaattacctgggcacggtgtgcacacctgtagtcccatctactcagaagcctgagacaggaggatctcttgagcccaggagttcaaggttaccatgagccgtgatcgcaccactgcactccagcctgggtgacaaagcaagaacccatctcaaaagaaaaataaataaattttaaaaataaattttctggccaggcacggtggtgcatgattgtaatcccagcactttgaaaggccgaggtgggagaatcttttgagctcggaagctcgagaccagcctgggtaacatggcaaaaccccatctctacaaaaaaaaatacaaaaattagccaggtatggtggaacatgcctgtagtcccagctactcaggaggctggggtgggaggattgcttgagcccaggaggtggaggctgcagtgagctgtgatcgtaccagtgtactccagcctgggtgacagaacgagaacatgtctcaaaaaaaaattttttttctagcaaccacattttttaatttagttatttttgagacggagtctcgctcttgtcacccaggctggagtgcaatggtgcaatcttgactcattgcaatctctgcctcccaggttcaagcaattctcctgcctcagccttccaagtagctgggattacaggtgcacaccaccgcgcctggctaatttttgtattttagtagagaccgggtttcaccatgttgggcaggctggtctcgaactcctgacctcaagtgatccaactgcctcagcctcccaaagtgctgggattacaggtgtgagccaccacacccagccattgccattttatagatgagaaaactgaggcacagaaagatgatggggcttgtccaaagtcacgagctagagcaggagcagggatttgaaccccagccatcgggctccttgcaaggagagcagagatgggttcctacatggtcattccttgggctgggtgagtgtgagcccttggtggtccaatcctactccccccagaggtctcagtaaagagagaatgctagtgattcttgagaatactgaagggaaaacccacagttggtcccaagaacgacggtgtgggtggaagtgaagagatgtgggaaaagattttcctctttcttgccccagattgccagggagttggaaaaatccccttgcactatgggctatagactagtggctgtcactgctactggattcttcatcactggaaaagcagaaagttggggtgagttccctgtgaagtcccagaccaggagaatggatgtaggaggagggcctctctttgttcttgttttttgtttgtttggtttggtttggtttttgtggggttttttgttttgttttgtttctgagacaaggtcttgctctgtcacccaggctggagtgcaatgtcatgatcagagctcactgcagcctcaacctcccggggatcaagcgatcctcccaccccagcctcctgagtagctgggattacaggcgcgtgccaccacacgcctggctaacttttgtactttttttagagacgaggtttcaccatgttgtccagactggtctagaactcctgggctcaagctatcctcccacctcggcctcccaaagtgctagaattacaggtgtgagccaccgtgcccggccaggagagcctctcttcaacaagcatctccagtgtgccaggctctggaaggagaactctagtctctcattttatgaccctccctttccaaatggggaaactgaggctcagaggagacatgtgactcatccaacatcacacagaggggaaggatggaaaagtttcctcccacccccatcccatggccacccaattccctttccagaggcaatggtatttattgccttgtgggtatttcttgacatgttctaggcatatacaagcatttacacacagatttttttttttacacaatagtggtacactgttctgtatcttatctttcattttacttaacattattttcaagatctttccacattaatacaaatagatgtgcctggttttatttattttatttaattaatttatttttgagacagagtctcactctgtcacctaggctagagtgcagtggcgtgatcttggctcactgcaacctccacctcctgggttcaagcaattctcctgccttgcctcccaagtagctgggattacaggcacccaccaccacgcccagctactttttgtatttttagtaga[141 bp omitted]catcaaactgtgtgagcacaccatcataagcataaccagttccctcctgataaacatttaggttattcctaatgttttgttattccaaacactactgcaattaacatcctggagcagacctgacatcagcctcaggcgtccatgtctacatgtgagataaattcctgagagaaaaacctgccaagtcagaagcgatctgcatttgtcatttagaaagacgtttccaaattgcaccccaatttccctcccctgcaactgattgaccaaccatttctcaaaagggctttttgagcactctctctctctctctctcttgctgtctctgtatttttttaatgtttgacagcaagaagatagtcatgtcttgcttatgtaattaaaattaaacaagcccttcgttaaaaacacacaaacccaggaagaagagaaaccagcaaggccagttcaggcagatccaccctgccccttgtcacacctgccttgtccccagcaagccctgaaaaagaggctgaaatcaatttctcacacatggacctcagacatcaaaccttggaaaaaatacaggaaagagattttgtaactttccccctctgtggcttttcgtacggctaaaccctctcactctctcttccctttctttctcctcgtcctttttcttctttctctcacttctgttttggtgagctgtcattaaaaacactttaaagccgtgtccagtctaataagttatacagaatctggctgtgtgtgtgtgtgtgtgtgtgtgtgtgtgtgtgtgtgtctgtgtgtgagagagagagaaagagagagagacagagtctcactctgtcgcccaggctggagtgcagtggtacaatcacagctcactgcagcctccgccttccgggttcaagtgattctcctgcctc[131 bp omitted]gctccgcctcccaggttcaaacgattcttctgcctcagcctcctgagtagctgggactacaggagtccgccaccacgtccagctaatttttgtatttttagtagagacagggttttaccatat[136 bp omitted]ttggccagactggtctcgaactcctcacctaaggtgatccgcccgcctcgacttcccaaagtgctgtgattacaggcgtgagccaccatgcccagccgattttgttgcatttttagtagagatggggtttcgccatattggccagactggtctcaaactcctgacttcaagagatccacccgcctcggcctcacaaaatgttgcgattatgggtatgagccaccacacctggccagaatctggtatttttaacagaaagcagagctaggagcttaaaagtagaaactagatgagcaaaacaattgattatatttgaaacacattaagctcttcttttctcttctcctcctgaacacaagcaagtaactgtctggaaggaggttggaggggttgcggtgggggagcgggagtctcagggcccataatgggtttcagaggccaagatggataaggaggtcatcctcccaagaagatgggaaggctggacagtgacagctgcaaaagattggttactttcagggggatggatccgctaagtaaatatattgccagcctggccaacatagcgaattcccatctctactaaaaatacaaaaattagccgggcgtggtggtgtgcacctgtagtcccagctactcgagaggctgaggcaggagaattgcttgaacctgggaggcagaagttgcagtgagccaagatcacgccactgcactccagcctgggcaacagagtgagactccatctcaaacaacaacaaaaaaaagcattggaagccagatttcttttttttgagacagtgtcttgctttgtcacccaggctggagtgcagtggcaccatcatggttcactgcaacctcggcctccagggttcaagcgatcctcccacctcagcatccccaagtagctgggactacaggcacgtgccaccacacctggctaatttttaatgtatttttcttagagacgaggttgcccaggatggtcttaaattcctggactcaagggatccgcctgcctcagcctcccaaaatgctgggattacaagcatgagccaccacgcccagctgagtggtagggattttgagctggggtgaatggcgattgtaggtcatttgcatttttaatcggctttacccagaagagaaggcaactttcttctgtcttcatgacaggaggtattttacaactgagagctgagtcatgtaccaaagttaggctctcaccttcctggggggagataggagtgctatttccttttatgtttacaatttcaaaaagatagtttcctgggtcctggtcactcatccctgtaatcccagcattttgagaagccaaggcaggaagatagcttgaccccagttcaagatcagcctgggcaacatagtgagactccatttcctgggctatcaactggcaagatactttttttttctttttttttttgtgacagagtgtcattttgtcgcccccaggctgaagtgcaatggcgtgatcttggctcgctgcaacctccgcctcccaggttgaagcgattctcatgcctcagcctcctgagtagctgggattacaggcacttgccaccacacctggctaatttctgtatttttagtagagacggggtttcaacatgttggtcaggctggtcttgaactcctgacctcgtgatccacccgccttggcctcccaaagtactgggattacgggcgtgagccaccgcgcccggccaagacttttaaagaggtttatatccatctcaaatggacaaagaaataatttacaatgacaagttttctcaagtaaatgctctaagaaaagggaggtaaggggcctctgtggttagaccctctggattctgagggcctagaggcaggaggaagcctgtctaaagtttagtcaagctgagggaaacattatggcagtgttggtacactctgtaaagctgacctgcccgtgttcaaatccgagctccactgcttaatagctgagtgacgtggggcaagtttcttaacctctctagccctgatttccccatcttgtaaaatgcaggtgattaacacttacttcataggatggttttgtagattaaatatattaatccaagtacagcacttaatacagtacctggcacataatcaatgtattatttgctgtgggtaattacttcatcattctgagcctcagtttccccaatcatcccatctgaaaatatgtggaaaagtcaatgagatgatggctgtaaactgatagcatagacttggcatctagtaagactgtctttaatcactaacacagctgggcacggtgcctcacatctgtaatcccagcacttgagagacagaggcaggaggatcatctgagcccaggagttcgagaccagcctgggtaacatagtgagacgccaatctctacaa[133 bp omitted]atggagaaaccccatctctactaaaaatataaaattagccaagcatggtggcacatgcctgtaatcccagctactcgggaggctgaggcaggagaatcgcttgaacctgggaggggaggttgtggcgagctgagattgtgccattgcactccagcctgggtaacaagagcaaaactccatttcaaaaaaaaaaaaaaagaaaaatcattaatactcccaacactacatttaccatcactgatgtttccctctatacatgtattgcaatatatgtgtttcagaataagagctcatactcttattgatgttctattttgttgctattctccttatttgctattgttttgttgttacctcacactactccccattatcaatagtaatattggctatcaatagcaatattggcaatatactgttatgatctcactattccccacatctgatcctcctcccatcaagcagtcgcaaagcctaccaggaactctctcattcccaaaccaggcttttcccctccagtgcctctagggccaggccttcatctgattggaaggagatggaggtggggctcaagccccaggtccccaacatcaagcaaagaccaacagcagcacccccgggtcctacagacaagtgggacacagtaggtaagcccagttaatgacttttttttttgagacggagtttcactctttgcccacgctggagtgcagtggcgtgatctcggctcaccgcaacctccacctcttgggttcaagcgattctcccgcctcagcctcccgagtagctgggattacaggcatgtgccaccatgcccagctaattttgtatttttagtagagacagggtttctccatgttggtcaggctggtctcggactccagacctcaggtgatccagctgcctctgcctcccaaagtgctggcattacaggcatgagccactgcacccaggcttaatgactcttagtaaaccagatgaagccgggtgcagtggctcctgcctgtaatcccaacactttgggagtccaaggcaggaggactgggcatcatagcaagacctcatctctacaaaaaataaaattagccaagtatgatgggataagcctgtagtcccagctacttgggagcctgaggcaggagttagaggttgcagtgagctatgattgggccactgcagtccagtttgggtgaacagagaccccgtctctaaaacaatgcagacggctggctggatgacaaggcgggtggagcctagggagggtacataaactcattagacaaagctctctattccctggcattgctaaaagccccattcgcccctccatgctgcttaatggtttcgcccggtctccccctcaccagtgggaccacccacatgcaggatagacccaggagattaaagttcaaccgtgacttcccccaggactgcggctctaggtcccatatctctcccgttaaaggctttatgatgcccaccctagctcagctagagcggttattgcgagaaacaaggtggaagtgactcctttaaagcactatacaaagtaattaaatctttattgaggcatttatgtgccagaaactgatcacacacagacataaggcacggtccctgccctcgaggagctcacagtctagtaaggaagacatatggggaaccgattccccaaagatgcggggagtaggggaggcagtgcttagagtggggagccattgtcccacccaccccacgctccaaagtccaggctggctaggagaaagtgagtaggaagcttagcatcctctctctcaccttccccgtgacagctgacttctctcactctgtcctaacatcacaagaggacaagcggagagacaaggatgagaaggatacaggagctgtcctcaaaaagctagaacacccctggcagaatatatacaacggtattttatttcccaaagccgcaaaccagcgcagcagaagctggggatactggggaatgttggaaaaacaggggctgggccagcccagtccagtggtgggaacaggaagtgatgagaagaggggtacccagggccagagaagtaggtgagagggaaatttccaggtggagaagctcacagtaggacaccagcagccacggccaacagaagggctgccaatccagctgtgggagccacacagcctttattatggggctgctggggccccccttttgcaggatactgccctgaattgctgcggtcctggtggccagcggcgcctccagtcaacctgggctcctcatcccgggaggcctcgtgttctactccctgtctcggagtctgactggttggcgctggcatgggtttggtggtggatgtgggtctcactggggccgaggtagaagtggtgacagatgtggttgaggccacagtcgtgggctctggagggggcagccggacaaggggtgggattcgaggggagaagtaggtcttgttgcggaggtcagagttacagcgggacccctggcaacaggagccactgagcgtgaaccctgggcctgttactccatcccgagtgcagaattcatcctggacacagccccggacaggcaaggacacagtcacattagctgcaggaaggagacacagataggtcagtggctggagggagagaggttgacatggcc[134 bp omitted]aaaaaaaaaagaacagagaacccccaaaatgagacagaaagtctctgcatccattaatcccaaaatctcaactcaggtcctactatgagaaacagacagactcactgtctttggcacatggtggattaacattttccattgtgctttgaatggaaatgtgtgtaggctgaaccaaaagtagggtttaaaacaaaggcttagactgagatacaagacctctcacaagaccacagtgcagaacaaacttcctctacaaccctctcaccattatccccttagccttcaccctggcttttacctccccatcagaatttactcttagagtcagagttacatctccacaccaggctcagtggttcacggctgtaatcccagcactctgggagacctaggcagggggatctcttagcccaagagttcaataccagcctgggtaacatggcaagaccccactgttaccaaaaataaaaggaaccagtcgtggcggtgcaccctgtagtcccagctacttgggaggctgaggcgggaggactgcttgagcccaagaggtagaggctgcagtgagctatgattgcgccactacactccaggctaggcgatagagcaagatgctgtctttaaaaaaaaatagtaataataaaataaaaaagaactacatcttccatagcataactggcaggggatgggatttgaagaacttcattttccatggttacatttctcaatagtctgggacaggcgggggaccccttgagttttaagggctaagaactagagattccccgcagtgcctgggcagaagcttagaggcttaaatacctcttaagtacctggcagccctctatggaaatgcatttccctccaaaacactctgggacaaagcatcactatccccacactattaatatgttgggggaagggactgcattttccatgatgccctacgatacaagcacctaggccccacgattcccagaatgcgtcgcaggttaaggaaacgctttgggtaaagggctccctaccgcccagggtgcttcagaagggctaccacaactcccgtaggtcccgtgctccggggctccctcacctgccgtcaaggtgacgttgccgtcgaagcagcccttgtagacatgatcgctggcgttgtagcagctcacgaccggcggcgatgtaccctggcacgcctcccggctcaggcccacacagctgtagcactccacgccgttgggcgggtatgcactctcattacctgcgaggggagccgagaggaagaaaaggtgtcgaaagggttcgggaaccgcagctcgtcctctagccccgcccctaaggcctggccccggcactatcgatgaccccgcctactagtagccccgccccagcgcgcaacctcgcggcgcctacagccagaaagtccctcctgctgcctcttggccccgccccagagtgtgaccccacccccagcccaggtcgagtactcccgcctctgccacggctccacctctatcttggcaggcccgaatgtggctccgcccccgcagctacggcccggcccccacggacctgccgggtcgagcgcccgcgaggtgaggttgagcttggcgttgcagcgatcctgagcgcattgctgcagctggatgaacgccagaagcccgtgaagatccaggccgcggtcattcttgccggggagtcccgaaccgcaaccccgcactgccagcgagaattgtccgtggactagggagagggacaagggcgggattagctgtgggcgtggtctcagatggggcgtggcccagagttgggtagggtctgggaggggcggggcctcaaataggccaacaccacaggaccgacaggcaggaattggcggatggacgcccccaaagagccgctcagagcggaaagaacgaccgaagcagggaggagcggggtcacggaacgggggcggaacctcaaagagctgagtcggaggagacagcctggttgacaggcagggatggggaggtctcattggtggagcagaaaaagtgcataggacgtgacctcgttccaaacccgagctctccccgtccgccccacccagttctcaactctctgctcctcgcgcttgtaattgttaatagagaaggcctggcctgcaaggctgtgtcgtagggtcccggccaggctgaaagggaggggtggggccgcgttaaaggggcgtggccagatccagaaaggactataaggaggcggggctgggccggaggagcctgcagtggtgtgcgtggcccgggggtccccactcactggtctccaccgcccccacggcctcggtgcagacgtccacgcccggcgcgcacttcactgtcttcatcttgttcggggagcatccgtcatctgctttctgcacgcagctgtagcactccagggcctgcgctcctgggggagcggagccgaatagacctgagccctccttgctaaagcgtccacccccaaggagaaatagtccttcccatgccctctgtcccgggattagacagtcttattgcacacacttttccagggcaggagtagggaaaagctttccacaaatctggaagcacgggaatcactggacccttttccttcacacccactatgccaactgtgggcacatccttccgacagccctgtatgcccactgtaggcgatccccgccatgaagcccctcatcccggggtaggaaggatacctcctcacggttttctgctcagaatgagagaacttttcccacagtgtgtgggagaacttttcccacagtagactgtgctcagtgagggatcccttcccacagcccccttctgctcaaatgagagaacactacccacagcttctctgcccaggacagggaacacttttttctttttttctttttttcttttttttttttttgagacggagtctcgctctgtcgccaggctggagtgcagtggcgcaatctcggctcactgcaacctcccctcctggattcaaacgattctcctgcctcagcctcccgagtagctgggactacaggctcgcgctaccgcgcccagctaatttttgtatttttagtagagacagggtttcaccatgttggccaggctggtctcgatcgtttgacctcatgatccgcctgcctcggcctcccaaagtgctgagattacaggcatgaaccaccgcgcccggcctaggaacaggggacttctttctgcagcttcaggataggaaaattttgcccacagctccccttgtccgtggtggggaacccttcctacggcccatggtggaggacccttccctctgcctcccttgcttaggatgggggaactttgcccacagtgccctctgcttatgtggggatccttcccacagccttctctgtacggggccagaggagcctcctccctaagagcccccactctaccccctccacctctccgggcagcagacccacctccgcgaagcagcagcagcagcagccagcctgcagtccagatcatggcctgggcacctgctttcctggcggggtccatggctccgtcctgctcccttggcgtcccccctggatgtgccgcctccgagctcgggccctcttacctgagcccaggatgagtaacctcgccccaggcaaccccagccttgcccaaccgggccaactcagcgtcggctgtggggcggggccccgcccctaggcgcgtcatccaagggagagcggtccctgccctgtgaagttgccaaggagggaaagggtgggagctgaggttccctgacagctcgcgggagaaagtctgtgtgtgtttggagtgggagagtagtggggcttaaagacaggctggggctactcgacattcagtgttcggtaactgttaaatgagcatctacagtgtgcccggctttggtctaggtaatgctggagatgaagacagaaccagtgcctgtcctggcagagctcacagtctgatgggggagacagatgctaatcaaataatcgtacaaattggtgtttaccaaagagactaagacactgaaggaaaaagtgtagtgatacaaggagatgtgcagtctagaagtgggggctggtcggtgagggcttccttgaggttatctgagatgcaacctcaagggcatgcaggatgtagccagctagagcaggtcaagagagggacacagccctttacaagcagagggaacagcacgtgggagcacctggaggtaggaggtaggatggaccattcaaacatggaaaggagagcagtgctcctgagctcagaagtccatgagagaagggcaggaactgagatgaaagagtcaggcagaggccgagacactcagggcatcagaggccccgacaagagatttggattaattttgagaatagtagagaacctttaagagggtctaaatgagctggaggacataatagatttgcttcctaatatgatcaacctgagaaatagtgcagctagccatcaagaagtaaatggaggccgggcgcggtggctcatgcctgtaatcccagcaatttgggaggccgagctgggtggatcacttgagatcaggagtttgagaccagcctgggcaacatggcgaaacctcatctctattaaaaaaaaataataaatttaaaaaaattagccaggtgcagtggcgtgcacctgctgtcccagctactcggaagggtagggcaggagaatcacttgagcccaggaggtggaggttgcagtgagctgagatcacgccactgcactccagcctgggcaacagagtgagaccctgtctcaaaaaaaaaaatttaaaaatttaaaaattaaaaaaaagtaaatggatctgagagtaggatatatgattttaaaaaaggaaaaagaaaaagaagtgaatggcaaaagagagtggttggttcggccaatggaatactacacagcaatagaaaagatccaacacctgatatatgcagcaacatatctcaaaaactttgtgttggggccaggcacagtggctcacacctgtaatcccagcactttgagacaccaaggtgggaggatcacttgaacccaggggttttgagaccaggctgtgcaacatagtgagatcccatctcattttattttaaaaaaagaaaaaacttggtgttgagtttagaaagccttaaacaaacaaacaaaacatactgtgtaactgaatatatatgaagtttcagaacagacaaaactaaccagtggtgatagaaatcagaacacatgttacctttgggagggcatggccccagaaggagcaacagggaggagcccccacgatcttcatctaggtgacagctgcatgtgtgtacagatacgttgagaatcactgactcaggcctgtcactggacgtatgttattcttcaataaaaacaaggtaaagaatgtcactgtggactctgtgtaaaaaaggaaaatgactctagaaggggtgagagagaaggccaggaaaccaacagggggccgtgtagttttccatggaagaaagagaaaaacagcccctaacagctgggagttggcctgacacacatagtgaggccatggagttcaactgcgcctagataatttcacagagcaccaacctggacaaggccacactgcgacagtaaaggatcaagaaacaaatcaatagcctgggcaacacagcgaaacctcgtctctactgaaaatacaaaaaattagctgggcgtgggggtgtgcacctataatcccagctacttgagaggctgagctgggagaatcacccgagcctgggaggttgaggctgcagtgagctgagattgcgacactgcactccagcttgggcaaccagagtgagaccctgtctcaaaaaaacaaaaaacaaagaaaaacaaaatcaagaccaatccatagccatgtctgaacacagaaacaaacaaggtcattgtgcaaaccgcagaatgactaagcatccccatatcctggctaatataaatgactgcttatattatattaaagttacaactttaacctcactttatttctcctgcctcataaatgagatttatgcaaatgcccaaccacagcattactcctcctctgtttaacagtatccaaactagaacgaggtcccacttccttgcaccattcccaagaccaccacacacaagcccaaatcttaaaatcaatcctttctggccaggtgctcacacctgtaatcccagcactttgggaggccaagggggtggatcacctgagctcaagagttcgagaccagactggccaatgtggtgaaactccgtctctactaaaaatacaaaaaattagctgggtgtggtggcacacacctgtaatcccagttcctggggagtaggggctgaggcaggagaatcgctgaacctaggaggcagaggttgcagtgagccgagatttgcgccactgccctccaacctgggtgacagagcaagactttgactcaaaaaaaaaaaaaatcaatcctttctaacacccttttacttagacacctcacagttacctcatggtgtgttttctccctcattgcaagaagcaataaacccaacttgttcaaccacaggtgtgtccctggtggagaacattgacacaggccagagcagatgtacttagccaagggtgtcccaaaggaaaggtgaagagtggaaagatctaaaatattttaggaggaagaacaggtagggattactgatggatccaatgtgagggaagaggaagtgggaggtttccaagctaattccagacagttcttgccataaaccacatcatgacattaataacaatggtaacaaaagtcataataacaacagtgactgagtatcaagtgtttgtttcccagaaactgttttgaacagggggcatgcattatctcatttaatcctcacctgtaagtatggttattagcatttattaaccacttactctgtgcttagcactttctgtgaatcctctctgaatgtcacgacagctctgcaaagagagaactaagtctcatttcacagatgggaaaactgagactgggagaggcttggaagtggcagaactgggatttgaatccagggctgtctccaaaggcccccatgccatttgccaaagtcagagcctggctttaggcctgagattatattttgcaatgacccttagttttacagccagacaggcatgcatttgaataccaactctgcccctaatctgctgtgtgacttgatcaagtgactccaattctttgatgttcagaggcttcctgtctaaacaaagactatgacaaaagcacatgcattcagtgcttcctctgtgccaggcaactttccacaccctttacacacaatcctatgagagatttctatgatggtcaatttacaaatggggaaatcgaggcaggcatggggggcttaacaacttgctcagggtcacaaagctaggaagtcacaatgctaggagacagtatttgaactcaggcagtctggcttaactaacagtacctataattaggtacatgggtccattggatatcagctgtgaaactttgacaattacttggcccctgtgtgcctcagtgccctcatcctcatccataaaatgagggtcttagtagtacccacatcatactaggtgctatactgctagggcatcaatgttatatatatgtgaaatactatactgctagggcatcaatgttaaatatatgtgaaatgattaaaatagggtcaaattctaggagttatgaaagcattagtttttattactaataataggttaagggccaagcacagtggctggtgcctgtaatcccagcattttgtgggggctgaggcgggcagatcacttgagcccaggagtttgagaccagcctgggcaacatagtgaaaccctatctctacaaaaaatacaaaaagtagccaggtgtggtggtgcacacctgtagatccaactactcgggaggccgaggtggaaggatcgcattgagcctgggaggtcaaggctgcagtaagttgtgatcacgtcactgtactccagcctgagtcacagagtgagaccctgtctcaataataataataataaatagattgttagtataactattattattaacagccctcacttcttgagctccaaccgtgtgccacacagggtggtcagctcttatacaagcaatcttgccttgaattcctaacgagggggtagagaggaagatctccttcacagaggaagactctgagacccagagagaggaaggtatctgttcaagttcacacagcaagggaagcggcagagtcagatgtcagacccggctgcagggggctggctcactgtctgatgacgagacaagcagcggtcgtgtttataaagatattatctgttctccagaccctgtgaggcacccccgttcccaacaatgacgagcacttcagtcacctgggtgaggtcacttggcatcatgctgaagctgagagagagaaagtgaatgacttcttgtgaagtcattcattcagcactgtccccttccccctccctccgcccgcctcccagccttggaatctcagccctgattcttgctttgctgtgtgatgctgcataaatgctttcatctctctgagcctccaaggtgtctttttttttttttttttttttgagacggagtttcactcgtttcccaggctggagtgcaaatggcgcaatctcagctcactgcaacctctgtctcccaggttcaagcgattcttctacctcagcctcccgagtagctgggattacaggcatccaccaccacactcagcaaattttttgtatttttagtagagatggagtttcgccatgttggtc[131 bp omitted]ttggtagggtaaggcagtgggcaaaatatcaagtctggaagtggacagacacattttaatcctatctctgccaccctcttgctgtgtaacctcaagcaactccatctccctctctgaacttcccctgaaaacccctacctcctgaaggatagagcggggacccagtgagtgacaggcagggtgagactagcattattattgtgtgctgctctgaagcaggaggccctgcaggtcccagctgtgtgggagagtttcagggaggaaccccaactggccagaccagaagaactagcatctcgggagggagtgggacccagggtggagaggtacctcttgctcaggcctgcccagattctaggcgctgacccccgcctggcccatgaccagagaacagaaggaggtttgaatgcagggcaccacttaagcctgctgcgtggtaggtggctggctcttctgggtcctttgcagattttatggcagagaatctagaatctggctcaggggtcagtgcggaggcagctgccagcaatacagatcactcccaggcctcagacaagcccaggaccatattcactctggatttctcgtctccctgtggcagaccaggctctgacgccagtgaggttcccagcctgactcaggcccactccctctgggacacactgtttgtgacaagttagggaaggagtggagtcagggatggggctgactgtataattttcgggccccagtgc[143 bp omitted]tgaaaccccatttctactaaaaatacaaaaaattagccaggtgtggtggcgtgtgcctgtaatcctagctactccagaggctgagacaggagaatcgcttgaacccaggaggcggagggtgcagtgagctgagatcgcaccattgcactccagcctgggcaacaagagcaaaactccattctcaccaaaaaaaaaaaaaaaaaaaaaaaaaaacaggaaagagtgctgttaaaggtactaaaatagaaacacttttttttcctttcttctgcctcaatcttttttttttttttttttttgagacagtctcactctgccacccaggctggcatgcagctcacagctcactgcagcctctctatctcccggactcaagcaatcctcccacctcagcctcccaagtagctgccactacaggtgtgtgccaccatgtccagctaatttttaaatttttttttgtagaaaaagggtcttgttatgttgcccaggctggtctcaaactcctgggctcaagtgatcttcctgtctcagcctcccaaaatgctaggattacgggcatgaggcactgcacctggccctcagcctttctcttgacccctcatggtgtttaatgttatgttcccttgggcacagagatacttgtgggaccagcacagatcttcaaaggtggctagggaccctgccccacaacgtgggcagcctggctgggttccccatcccaccagatgcccaccgccatgttccaccccaagataccatgaggcacaggtacccaaccctgatcttcttgtggcgtgcctgcagcaggagtggagagtgccagtgatcacggggcagagttaagaagggaacaggccaggcacggtggctcaaacctgtattcccagcattttgggaggcccaggcaggcggaccacttgaggtcaggagttccagaccagcctggccaacatggtgaaaccctgtctctactaaaaattcaaaaattagccgggtgtggtggccagcgcctaaaatcccagctactcaggaggctgaggcaggagaatcgcttgaacctgggaggcagaggttgcagtgagccgagatcgcgccactgcactccagcctaggtgacagagtaagactccgtctcaagaaaaaaaagaggtggggacaggagtggaaacttgtcccagagaggtgaggctgcctcatcatgctttcattatctcattagtcttagcttacaaaacagaaattcaaagatacatttacgaatttctacacagtgaccacagagcattaaacccaagagcagggctcttctgaacacggggagctgtcgtctacattggtcagatgcccatgaagcgggattcagtaagggacccagtttgcagaggggctgggggatgaactgatccaagaatccagatgtcacatacctgaaggtagaggccaagggacacctacagtcccagaggacctaggaatttgggtgtctgcactcccgggactcagagcactatatctgggtcctcaagggaactttttgaggcaggaaagagctgtctccagaatgacagcctagagtgctcaagtgggggaccctggaggactgtagaggcccagaacaggcacctgacccagcctaggggtcagggagagcttcttgaaggaacgggcgccgtagatgagacctgaaggatgaagtcagccaaagagctctgcctgccttgttcatgacagtccccagcccttagcatcactttcccatcagtttattcaaccaccagatgttccctccgtacgcagtatgcaccaggccctctgctgtaccaagggttcagtggtgaccaagacagcactcactcccaggccagagcgggagacagactcaacagcagtgatgatcccaggtagtgaaggccatgatgagagatgcacaggatagaatgatcagggctgggaatggggaggcacaggtggagctgtcagggctataatgaaaagcccagggccaggagcagtggctcacgcctgtaattccaacactttgggaggccgagacaggcaggtcgcttgagcctgggagttggaggctagcctggactacatggtgaaaccccatctctactaaaaatacaaaaaaaagaaagccaggcgtggtgtggtggtgggtgcctgtaatcccagctactcgggaggctgaggcagaagaatcgtttgaacctgagaggtggaggttgcagtgagccgagattgcaccactgcactccagcctgggcgacagactgagactcagtctcaaaaaaaaagaaaagcccagaggaagcatctgacctgccaggacaatcagggagggcttcctggagaaagagacttaatataggaactaaaagctaaatgatgagcagggcttttgtggaatggggagaggtgcctaagcaaagggaacagaacgtacaaaggcccagaggtgaaagggaagcgagttttattttttgtttttttccactttcatggaatgagacatgctctatggtgctgggaacagcagtgaccaggacaatgctggctctgcctcatggagctcccagtgcataaaggacacagatccatcgcccatgatgacccagggtcctcagggatgggatgacagagctcaaaagggggtgcctgacccagccaggaaagtcagtgagggcttcctgaaggaggtgccaactgaactaaggctggaagaatgaggtgcagctgattaagggaaggaggggggccaggcgtggtggctcacacctgtaatctcagcaccttgggaggctaaggtgagtggatcgcttaagtccaggagttggagaccagcctgggcaacacagtgagaccccatctctataaaaataaatagataaaagaaaaaaagggaagaaaagggcagagggaacaacgtaggcaaaggcctaaaggggggaagcctaggagttcctagaaatttccagcagccggtcaggccagaaagggtggaaacagaagggcctacaaactaaaaaagcaaaactgccaaacactaagggggacatgcctctcaccctcttctcccagctatgaccttaagagttgaaggcctccattcctagagagccggctgtgggacgcgtggctcccagaggtaccgataactcagatgtcctgcctaggggtcaaggggccccggatgcctgggctggaaaccacagcagcaattcctgtttttcctccgtatttaattcggtatcacaggagcaccaataaatagtttcttcccgcccctgcaatcttcctcctgccccgggcagggccttaggggccggcgatcccgtcgggggcaaggcacctgcaacccagaacgcagcagctcaggccagctgaactgccgcgcctgcggaattcccgggagagttccaaagcggtgcgtccaagttttccggcagtgggcggggcctaggaacgcccccgcgccccgcgccggcggagcctcgaagggacttccccccaagagggcggggccactcagggggcgtggttttcgtcagcggcggtcacgatgacgtccatccaaatgcgcatggcttcggggctcggagccaccatgtagaaaaggcgttcgtaggttttgacgcagaaggtcaggcgggggttggggctctggaataagcagaaagtgagggtaattcagacaaaagacaccggccacagtctgggtgcgaacccagccttgctacttatagtctgtgtggcactggacaaggtacttaagtatctgaatgtcagtttccctgtcttcccaaatgatgccacctacctcactgggttataaggattaaatgaattaacacaaggaagtgcttaaaattatcatatgtagagcgctattgataaattaggggcaagataaattttttttcttttttttttgaaactgagtctggctctgtcgccaggctggagtgcagtggcgcaatcttggctcactgcaacctccacctctcgagttcaagcgattctcctgcctcagcctcccgagtagctgggactacaggcgtgtgccaccacgcccagctaatttttgtatttttagtacagaccagggtttcacagtgtttgtcaggatggtctcgatctcttgacctcgtgatccgcctgcttcggcctcccagagtgctgggcttacaggcgtgagccactgtgccaggccgagaaatttaaaagtaggacttatgacgccttctctcagcctaacttctcctatattagaaatacaggcattcaaattccacctccccaaaatctaggtccccttgtacctgggaaaagttagtgtctagaatccgttatttgagtacccacttgccaatcccaaattgagtaaatcccttatgtccataatctgtttttagccctctcaataaccctgatggaatgggttgatgcgtacccattctacacgtgagaaaactcaggccggccgggctgggtggctcacgcctgcaatcccagcactttgggaggttgaagcggattgattgcttgaactcaggagttcaagaccagcctgggcaacagagggagaccccatctctacaaaaaaataccagaaaaacaaaacaaaacaaattagctgggtgtggtggcacacacatatagtcctagctactcaggaggctgaggcaggaggattgcttgagcccgagagatagaggctgcagtgagctatgattgtaccactgcactccagcctggtctatggagcaagaaaaaaaaaaagaaaaagaaacaaagaaaactaaggctaaaggctaaagaaaggaagtcactttcctgatgtcacatagctgagattccaacctaattgctaaaaagccacagtttggttattctccacagagctttctaaatattgtatcagttgccaacatttaaatttttggcactgtgctttatacaagttccaattcctgagttctctgggaaaaaataaatataagacaacaccatgggacccactcccacttggcaactgttggcaggagccaactaacaaccatctcctttatttatttttcatttaaaaaataaaaaaaaaaaaacagagatgggatcttgctatgttgaccatgctggtctcaaactcctggcctcctgcagtcctcccatcttggtctcccaaaatgttgggattataggcatgagccacgacgcctggcagatcatctcctttagatgctcccaggctgcccgacccttgctgtgacctctccattcatttattcccagttggacatcagagtc[131 bp omitted]accagcctggccaacacagtgacaccccatctcaactaaaaatacaaaagttagccagctgtggtggcacgcctgtaatcccaactacttgggaggctgaggcaggagaatcgcttgaacccgggaggcagaggttgcagtgagccaagatggcgccaccgcactccagcctgggcaacagagccagactccatctaaaaaaaaaaaaagagccacgtgtggtgcggtggttcacgcctgtaatcccagaactttgagaggctg[132 bp omitted]gagaattgcttgaaccagggaggcggaggttgcagtgagccgagatggcgccactgtactcaggcctgggcgacagaatgagactctgtcttaaaaaaaaaaaaaaagaagaaaattaacagtggctgaaggccagagtctgggctcttaatttttagtccctgcagtcaggtgacctgtttgttttctctgcgacaaacacgtactcctatgagtaccctgacaggagaagctgcgggtggctttccccaggatgagccagggatgagataaggcctgactccaactgagtctccaactgggaggtcagggtgacattgaggggcttcaccttgaaggcacagcgtaagtggtcataatagacttcctcaatggcctggaagtagatgacacctttgagcttggtctcttccttgtctggtaggggaggtaagagaaaaagagagccagtgagaaaggtgtgtctgtgtgtgtcgaggtgagggtcattggccctaagtcctgagactggatttgggtaagaaacatggtgacaagagtctgaaggtctctaaaggttgggaggtgagtgaatgttaacgctggatgggagactgggcacagaaactggacatgattggggagtggggtctgtggagctggaatcctaggccctgaatgctcggcctctgagaagggaaggaactcagggagtgctcaagtgctttctaggtataatctctaaccctctcaaactctcctggaggggtaagtacatttatctccatctgacagatgtggaaaccaagactcagagaagttaaggcacccagcacaagtcacacagccagagctgacagagccaggactcaccaagtagagtcaaatggtcatacaggttagggaagaaggatttgagacaatacaagcgtccaaggaggctgggtgcagtggctcaagcctgtaatcccagcactttaggaggctgaggcaggcagatcacaaggtcaggagatcgagaccatcctggctaacacagtgaaaccctgtctctactaaaaatacaaaaaattagccaggtgtggtggcatgagcctgtagtcccgcctattcaggaggctgaggcaggagaatcgcttgagccggggaggtggaggttgcagtgggctgagatcgcaccactgcactccagcctgggcgacagagcaagactctgtctccaaaaaacaaaaacaaaaacaaaaacaaaaaaaagtgtccaaggagaggtttggaataattgattctcctagagaagaaggacaagggccccagactcctggccattggggggctgggggcagctgacagtgcaggttcagactcatgggtgtcttaggaacatgggccctgggaagcttgaattgtactaaactgttatctatgtccctgaggaggactgggggtttgaattctgggtggcttaaagaggggctggggatctggattccagggtctggaggagagagagagctgggagcctggactcctgggttgtagggaagttaggagctagggaaccaaacttctggatcctggggaacatggaaagtgggggccaggacttctggtgcctgtagaggaaaggcctccggagtggaattccagcgtcctggggcccatggtggccaggctgggcttacccgcatagtaggccaagcggcgggcttggcggtcaaagcagaaccatcgcttcctccaggtcttgatgcggccgcccatcttcaccaggggtccacggcagcagcacccagacacctgcacatgtgggcagttttccgggttgtggccccatccctccagatgctgccggagatccaagattcgcgggcctggagggtggggtggggtgggtggggcctggggagcaaagagacggggcagctgatgtaaggggcgggggattctacagcctggagcccctcgaggggagcaagtcatagcagcttgcatgtaaggcccgctacagcctttagagggtaatattaactaggaccatctgacaaatgcaacggctacgtggattgactgtgatgctctgcccaggactttatggacatcagctccttggcacttcatggcaactgtgagccccattttacaaatgagcaaaatgaggtacagagagatgacataatgcacccgaggtcacacagagcttctaggcagcagaactgggacacgaacccaggtatttctgaccctagagctcaccctgaaacatcagaggcctatcaaaagaaataaagatcgggccgggtgtggtggcttatgcctgtaatctcagaactttgggaggctgaggtaggaggatcccttaggcctaagaattcaagggcagcctgggcaacatagtgagatcctgtctctgaaaaaaaaaaattttttttggaaaaaagaaatgaagattggagcctgtgtggtggcttaagcctgtaattccagctactcaggaggctgcggtgggaggatcccttgatcccagaagttggaaaccagcctgggcaacacagaagaccccttctctatttaaaaaaaaaaaaaaaaaaaaaaaaaaaaggagagagagaagagaagctatgtgcagtggctcatgcctgtaatctcagcactttgggaagctgaagtgggaggatcacttgaggctatgagttggagaccagcctgggcaatatagtgagaccccatctctactaaaaatccaaaaaattagctgggcctagtgctgcacacctgtagttccagctactaaggaggctgagcccaggaggatcacttgagcccaggagatcgaaattgcattgagctatgattgcaccactgcactccagcctgggtgattgagtgagaccctgtctcaaaaataaaaaagaaagagagagcttgtttacattattattgttgtgatgaaattaatgaatataatcctctgctaagtactttctaggtataatctctgccccctcaaactctcctgaaggggtaagtacatttatctccgtttcacagatgtggaaaccaagactcagagaggttaagtcactcggcacaagtcacacagccagagctgacagagccaggactcaccaggtagagtggtcacctcagatggtcatacaggttggggaggaggatttaaggcaatacaagtgtccactatttatgagagcctgaccatgagctggtctgatccaacctattcttcccaaataatccctgcaaacagtggtatgattccggaggtcaaactgaggttcagggtagtacatctcagatttcttcatgcaagcagatccgctggggattttgttaaaatgttaaaatgcagactctgattcagtcatttcagggtggagtctggagtagggggagaggttctgcatgtctgacaagctcccaggtgggccctgatgctgctgttccaccagccacactttgagtgtcaaggagttagaaaactgaagcaggatgggtgcggtggctcacacgtgtaatcccagcactttgggaggccaagaggggaggatcacttaaacccaggagtttgagaccagcctggggcaacatggcgaaaccccgtctctacaaaaaatacaaaaattaggctgggcgtggtggctcacgcctacaatcccagcactttgggaagccaaggtggggggatcacctgaggttgggagtttgagaccagcctgaccaacatggagaaaccctgtctctgctgaaaatacaaaattagccaggcgtggtggcgcatgcctgtaatcccagctactcaggaggctgaggcaggagaatcgcttgaactcgggaggtggaggttgcggtgaatcaagatggcaccattgcactccagccttggcaacaagagcgaaactccatctcaaaaaaaaaatacaaaaatacaaacattagccaggcatggtggtgtgtgcctaggatcccggctaattaggaggctgaggtgggaggatcgcttgagcccaggaggtgggggttgcagtgagccgagatcacaccacggcactccaggctgggtgacaaagggagaccatgtctcaaaaaaaaaaaaagaaagaaaagaaagaaaactgaagcaaggccagagcaagaagggatgagaaacagagatgagatctgctggttggagacaggagagtgaggtggggaaatgagaaggattagggaggagggaaaggaagggagggaaaggccaggtttaaagagtacccgctgggcctgcaatctccccaaatccacacagaaagaccaaggatcaccactgtgtgtggaagctcccgctctgtgtcaggcactatgccaagtggtcactgtgattacctcgtttcttctccaaaagaacccattaatgttcctgctagacagatcaagaaactgaggctttaagaagaggtgactctccaaggtcaccaaactaggatgtaggggagctgggccccaatctaggaggagaccagggatgggcttgggactccaccactgcccggctgtgtcacctccacagaactcctgcccctctgggagcctcagttccctatgctaaaacaccagggttatcacagcactctcctctggggctgtttcaaggatgagctggctgccctcagggtctctcacctagaggttcctcttctaggtgtgaagcccagggacacacttgctcacgtgcacaaaagatagcaggggtgtacggcaggggacaaagcacacagcaggggactgtttaataaatgatgatgctagaagccaggcagaacaccagagcaggagcaattctgtttgtttgtttgtttgtttgttttgagacagagtctcgctctgtcacccaggctggagagcagtggtgtgatcttggctcattgcaacctctgcttcccagttcaagcgattctcctgcctcagcctctcgggtagctgtgactataggcacatgccaccacgcccagatgatttttgtattttcagtagagacggggtttctccatgttggtcaggctggtctcgaactcctgacctcaggtgatctgcccacctcagcctcccaaaatgctgggattacaggcgtgagccaccacgcctggcctgtgcttcgtttttaatgagcacaagcttatgcctaacaatgcagaagaccccactgccgttcctgccttattttgctccctggctcttatcagcctctgacatgctatttattttacatattgatgttgctttgtgtccatcttcccccttaaaacatcagcttcccccaaaggtggggattgttatcttggtcactgctatgacccagggtctagcacacagtaggcactcaataaatatgggctgaaatgaataagggaaggacaaatggtggtaaaaacaaaaaggttgggaaggatgtgcttatttatgagacaaattcacaaaatatggcttgactggtgcatgtggaaaagtataaacacagatttgaaggcttctcagcagtagaagtgagatcaggaagaaagtgaccactttcttaatactttatctatcattcttttttttttttgaggcagggtctcactctgtcactgaagctggagtgcagtggggcgattatagctcactgcagcctccacccactgggctcaagcaatcctcccaccttagccttttcccgagtagctgggaccaaaggcatgcaccaccacacctgctaattttttaaatttctgtagagatgagggtctgactatgttgcccaggctgttctccagctccgggactcaagtgatcctcccacctcggcctctcaaagtgctgagattataggcgtgagctatggtgcctagctttatcattctttataacaaaacgcattgattctatgaatgttattagtataggcaaaaatgtaatttatgtaagggagttgtcagctaaatcaagaatgtgaaaaagtcaacaggataaattatttgattatttccacaaataaatagcattttctttaatggggaggcagaactgttagagattaaaagatttaagagacattaaaccaaatgcatagcgtgtgctttgcatatagattcaaataaatcaactgtgaaaagatattttaggtcaggcatgatggttcaggcctataatctcagcactttggccagaagggaggctcgaggccaggaattcaataccagcctggccaacatagtgtctctactgttaaaaatggaaaacaaggccaggcacggtagctcatgcctgtaatgccagcactttgggaggccaaagcgggtggatcacctgaggtcaggagttcaaaaccagcctggccaacatggtgaaaccccgtctctactataaatacaaaattagccaggcatggtggtgggcgcctgtaatcctagctactccagaggctgaggcgggagaatcgcttgaaccctggaggcggagattgcagtgagccgagattgtaatactgcactccagcttgggcaacaaagtgagactccatcttggaaaaaaaaaaaaaaaaggaaaagaaaaataataaataaatttttaaaaacatattttggagacaatgagagaaatgtgaatatggactatatattacaatataatgaaattaataatctcataagatgtgacaatggaatttttgttatgttaaaaaaaaaaaaaaacttattggccaggcacagtggcttacacttttaatcccagcactttttgaggccaaggcacacagatcacctgaggtcaggagttcaagaccagcccggacagcatggcaaaaccccatcgctactaaaaacaaacaaaaaaaataaatgggtgtggtggtgggcacctgtactcccagctactcgggaggctgaggtagaagaatcgcttgaaccagggaggcagaggttccagtgagctgagatcacatcactgcactctagcctgggcgacaagagtaaaactctgtcccccaaaaaacaagcctatctattggagatacacagtgatgtttgagtgaaaggatacaatattttgctttaaaatatttcagtgcagagtgggatgtaggtatgggattagtaaaataaaattggtggctgggcaccaatgccctagaattattcttataattctagcagcttggaggctgacatgggaggattgtttgaggccaggagtttgagatcagcctggacaacatagcaagactctatctctacaaaaataaaatacattaaaaatataggagtgcagaagacttatgagaaaaaaagaaaaatattaaaaataaaaataaaatatatatacctagtacatacacaaattaaaatgttaaataaaataaataaaaagttggcaagtacaagattcaatattgaaaatgattaaagctgcgcagtgggcacctgggggtctattaatctactccttctctcatgcatatgcttgaatatttctatcgtaaaaaggttttttgtttttttttttgagacagaatcttggtctgtcaccaagactggagtgcagtggtgtgatcttggctcactgcaacctgcacctcccaggttcaagcaattctctgcctc[221 bp omitted]ttggttttgatttttttttttttttgagacagattttcgctcttattgccaaggctggagtgtagtggtacaatctcggctcactgcaacctccacctgcgggttcaagtgattctcatgcctcagtctcccgagtagctgggattacaggcatgtgccaccatgcccggctaatttttgtatttttagtagagatggggtttcaccatgctggccaggctggtcgcaaactcaggtgatccacccgccttggcctcccaaagtgctgggattacaggcatgagccactgcacccagccaaaaacaaaattttaaatgatttttaaaagttccagcatggactgggcatggtggttcacgctataatcccagtactctgggaggctgaggcaggaggattgcttgaggccaggaataagtcccagcatggacttgtcctccttctgtactgactgctgacattgtcaccaatgtacagaagaggaaaatgaggcagagtagagcaagttacccgaggacctgccacacatggagatgaccatcatccggtcatgggaacaggaactggtcctctgcagttccctttcccttgccaagcccaggacaattttctgttcaattggaggagaggaaagggtcagatgtaagaaagggcataggtcagggggagaaacagagcagggagaggtgggcgtgagggcgggggtgggactgaccgtgatggcaggaacagcagggcctgaggaaccttccgtgccccttcttgttccttcctgtggattcaggatgaagcactcaatgaggatcccagcccataagatggtagggtggctggagaatgtcctagcttctctgttctgagggtacagggactgggggcctggactcctgggtatgagggaggatgggctgggggcctggactcctgggtctgagggtggaggggctgggggcctggacccctgggtctgagggaggtggagttgggggtctcccaggtctgagggaggagaggctggggcagtcttctgttccgaagaggatggcctgggctctcacccgggccttgagcagccgctccctctccgccatggcctgctgcaggagccgctccatgtgggcaatgtctggatggatggccccacagctaggaggagggaacacagacggggtgggttacagtggctgggcctcttcttccatctccccaccttctctctgatgtctcacctattcccacggccacagttcagcagctggtagagggggtatctgccggagtcccccactgctggcgggagagctgaggcctccagggattctagggtagaggggaccaggttacagggctggatacaccctggcctgagcctatccacttctcccctgcaggcataggtgcgggtttcctccatcctctgctgcaggatgagtgctgatgtgggaaggaagtggggaacagggggatcctcaccagtacaatggaaggacagaggtcggggggatcctctctggctccccctctccccccttttccggggcaggctcccagtcctctggaggccaatggagccctgaaaacacaaaaggctcatgagcataggaaaaaggcttgatctccaacctaagtcagagcactgcccagtgaagccaccacccagtcagcacaaatcaaaacactactgtccatgtgctgagtgaaaggacctcacaggggtatgatcccgtttataagaaatatcaagctgagcacagtggcttatgcctgtaatcccagcactttgggagtccaaggcaggtggatcacctgaggccgggagctcgacaccagcctggccaatatggtgaaaccccatctctactaaaaatacagaaattagccgggcatggtggcacgcgcctgtagtcccagctactcgggaggctgaggcagaagaatcgcttgaacccgggaggtggagattgcaatgagctgagatcgcgccactgtactccagcctgggcgacagagcaagactctgtctcaaaaaaaaaaaaaaaaaacacagaaaagaaaaaaagaaatgtccggaacaggcaaattaacatagaaatgggaagtagaattgtggttgcccggactggggtagatcggggaaccgagaggctaagggatgcagggtttcttttgggggataatgaaaatgttctaaaattgattgtggtaatgtttgcgcaacgttgaatatactaaaagacacagaactgtacattttaaatgaatgaattgtatagggacgtgaattatgcctca[212 bp omitted]gaggcaggagaattgcttgaacctgggaggcaaaggttccagtgagccgagatctcgccactgaaatccaggctggacgacagagcgagactctgtcgcaaaaaaaaaaaagtcccactgcagccaggcgcagtggctcacacctataatgccagcactttgaggctgaggcaggcaaattgcttgagcccaggagttggagatgagcctgggcaacatggtgaaactctgtctctacaaaaaaatagaaaaattagctgggcatagtggcacgtgcctgcagtcccagctactgtggaggctgacgtggaaggatcgcttgaaccccggaggtcaaggttgcagggagctgagattgtgccactgcgctccagtctgggcgacagagtgacagcctgtctcaaaaaaaataagtaaaacaaaaaaacaaaaaacccaccgtgctggtggctatgtaggaaacccagatgccctcacatgatactgggggtgttctactggaacaagctttatggagggcaacttggcttttttaaaaaaaatctgaatgacaaatgcataaaccatggagccccaattccaattctagaaattcagcggatggatacactcatacacatgcaaagtgatctgagttcaaggtgattccctgcagtgccatctgtgctagcaaaagcctggagaccacctaaatgcccatcagaaggggacaaggtaaatgaaccatggcttatgcactccatagaccattttttttttttttgagttggagtctcactctgttgcccaggctggagtgcagtagcacaatctcggctcattgcaacctccgcctcctgggttcaagcgattcttctgcctcagcctcacgagtagctgggattacaggcatgtgccaccacgccaggctaatttttgtatttttagtagagatggggtttc[148 bp omitted]cctacatccaggtagaacataatatccaaaaaagaaaagaaaaaaaacagaacataatatccaagagaaaaccaaggccaggtgtggtagcgtgcacctgtagtcccagctactcaggaggctgaggtgggaggatcacttgagcccaggaggttgaccctgcagtgagccatgatcatgccactgcactccagcctgggcgacagtgagatctatctcttaaagtttttttttttttttttttaagcgagtacagaacagcatagaataaactaggtatgcataaaagagggagaaagtacatacatgactagctgtgtcaacacagaatatctctggggaacacatgggaaattggtaaccctggtggccctcaggaagtgaacagcgtaggagggggaacaagagccgcagagtcttctctgaatatcctcccacaccatgtgaattttgaacgaggagaatgttaactttttaaaagcaaataaacatgacaactaaatgcaacctgtgttcctgagccaagaaaaaaaaagtttgtttttttttgtgaattttttgctagaaaaaacactggtggggccaggaacagtggctcatgcctgtaatcccagcactctggaaggccg[134 bp omitted]gaggcaggagaatcacttgaaccagggaggcagtggttgcagtgagccgagatcacaccactgcactccagcctgagcggcagagcaagactctgccaaaaaggaaaaaaaaaaagaaagagcaagagagagaaaaaggaaggaaggaaggaaggaagggaaggaggaagggagggagggagggaaaaacattggtggaacaactgacaaaatacaaataaggtctgtggattctaatagtgttgtctcagtggtagtttcctgaaatcgatcattgaactgtggttgtgtaagagaatgggcttgacattaggtagtaaatttaggaatatttaggggttaaggggaatcatgggtaagaaaataatgggccaggcatgaaggctcacacctgtaatcctagcactttgggaggtccagggaaggcagatcactttagctcaggaatttgagaccagactggggcaatatagtgagaccccatgtctacaaagaatacaaaaattagcctggcgcatgtctgtaatcccagctacttggggggctgaggcaggagaatcgcttgagtctgggaggtagaggctgcagtgagccaagatcgcaccattacactccactccagcctgggcgacagagcgagactgtctcaaaaattgaaaactaaaaaaaataaaaactctgggagttgagaaatgttagctccacttcacagagaagaaactgaggctcaaatccccgtgctttacttgactttttccttccttccagccacattcccagcacttcctagctgggagatattagatacttggcactgaggaaccaagtgggcaggtcagaccccagctttgtctgcagggcacttatgttgtaggaactgcataagccatcagcaggccatagaaacaggccggttcgggttcaaatcccagctctgccacttcctgggtgcatgacgtaggcaagtcatttctcttctcaagcgaggtgtcctctctgtaaagtgggtaacatctcactgcccttcctgggttgttgcaaggattaaatgagtgacctcctgcaatgcatgtagaagcatgcatggcccccaggtgagatccaggagctaagcaatgatccacattggtgggtacagggtgcacctgggcttagaggccttctgtgcacaggggccaacaagtcaggtgacaactccataggactggacatggcgtcccaccaaatattttcatatatgcaatttactaataagggtaattgctatcctaagtcacgttgcctggcaacacagctgacacctaccttcatcaggtttccaggggaagcagccagaaagttaatttcccatacagaagaacatctgctaacccttcacccaaataataacggaacctgcttgtgagggttcttcccaagaaaaaatgaaattttatatattaggttgagccaggggaattgccagtatacgactgtttcttgcctccaaatattagcaattccataagattcaaagtgataaaatggtttagaacagaccctgacctatattaagtgctttaaaattagtgttattaatattgattaataaataacaagattttttttttttaagatggagtctcgctctgttgcccaggctgtcatgcagtggtgcgaccttagctcaccgaaacctccatctcctgggttcaaactattctcctgcctcagcctcccgagtaactgggattataggcacgcaccagcacacccagctaattttttttttttttttgagacaaggtctcgctctgttgcccaggctggagtgcagtggcatgatctcagctcactgcaacctccgcctcccaggttcaagcaattctcctgccaaagcctcctgagtagctgggactaggctaatttgttgtatttttagtagagacagggtttcaccatgttagccaggctggtctcgatctcctgaccttatgacctgcctgcctctgcctcccaaagt[135 bp omitted]ttccgggttcaagcgattcttctgt[134 bp omitted]gcctcccaaagtgctgggattacaggtgtgagccaccgcgcccagccaattttttgtatttttagtagagatggggtttcaccaagttggccaggctggtcttgaactcctgtcctcaagggatccacccacctcggcctctcaaagtgctggattacaggcatgagctgacgcacactgttattatttatttatttttaagacaaagtctcactctgtcgcccaggtctggaactcctgacctcaggtgatccatctgcctcagcctcccaaaatgctggggttacaggcatgagccaccaagcccagcccacacactggtattcttaacagtattgcttaaactgcaggatggcttgagcctgggaggcagatcgtgtcactgcactctggcctgggtgacagagccagaccctatctcaaaaaaaaaaaaaaaaaaaggaaaaaagaacctaagttctgaaaacagagtacctgggttcaaatcccagctctgccacatactagctggttaaacaacttaacctctcttggtgtttttgcctataacatggaaacaagaacctagctcacagatttgttgcaaagacaaatcagtaagccaatcagcatgaagcatttgtaaccatgccttgcacactataatgactcaataaaaccattgttattattattgctattgttaatgttattattattattattgtaaagtcattaaaaatgaggcaactgtaaatgtatcaatgtaaaacaatctccaagatagagttaagttaaaaaataaaaaccagtgggccaggcacagtggctcacacctgtaatcccagcactttgggaggccaaggtgggcagatcacctgaggtcaggagttcgagaccagcctggccaacatggcaaaaccccatctctactaaaaatacaaaaattagccaggcttggtggcgcatgcctgtaatcccagctactcaggaggctgaggctggagaatcgcttgaacccaggaggcggaggttgcagtgagttgagatcgcaccattgcactccagcctggcaataagagtgaaactctgtctcagaataaataaataaataaataaataaataaataaataaaataaaagccagtgagaccctatctctacaaattggacccatgcgcggtggctcatgcctgtaatcccagcaatttgggaggctaaaacaagaggaccatttgagcctaagggttcaagaccagcttgggcaaaaggaagaccccaactctacaaaaataacttcaaaaatcagctgtgtatggtggtgtgtggtgcatgcctgtggtcccagctactcaaggaggatcacctgagcctgggaggttgaggctgcagtgagctgtgatcccaccattgcactctagcctgggcaacagagtgagactctgtcaaaaaaaaaaagctagaagaggacttgaaatgttctcaacacacagaaatgataaatacttgaggtgatagataccccaataccctgacttattacacattctatgcatgtaatagcatatgtaccccataaatatgtcccaaatatatcatttttaaaaagaaaagccaactagtagctaatatacacatttttcagaaggacaggttgaatatcccttctccaaaatacttgggaccagaagggtttcagatttgggattttttttcagattttggaatatttgggttgagcatccctaacctaaaactctgaaacccaaactgctccaatgtgcatttccttggagtatcatgtaggcactcaaagagtttcagatttttgagcattttggattagggattttttttgtttgttttttgagacaaagtctcactctgtcgcctaggctggagtacagtggcataatctcggctcactgcaacctctgccttctcaggttcaagtaattctcgtgcctcagccctgcatcaccatgcctggctaatttttgtatttttagtagagatggggtttcaccatattggccaggctggtctcgaactcctgacctcaggtcatccgcttgccttggcctcccaaagtgctgggattacaggcatgagccaccatgctgggcgcctgttttaactataaatgagctgcccccccaccacccccgcagttttaaggaagtctagaaggattctcaaaacacaagtagctgcgttacttctgagaaggggagaccttattaaaatatgctgtttggttgcttttaaaatctactcctgggtgcacatgttcccatttcgccagggcaggggtgggtgttacacagaaaaaaaataacaataataaagctggagtcataggaataacccttggccaaccttccctatcccccaccggccccatacagaaaatcagagtggaagttctggagaccccagttcggggactctgctgttagcccctccctcctcactgaccaataagatatatggggaaacagaggccgtgggggaggcacctgcagggagctgtggacagaaaagaggcaggaagaagtaggggtggcagcggagtgggccacggcatcctggagcaccagcagctggcggtctgtcttctgggtgaacagcagctgcaagagatggggtgaagtttcgtgggagcaggagagaccccagagcaactgccagtttccacgtgctctggcccatgcctctagtgccacccatttctcagaaagaaaaactaaggagagatggaatgtggtccttcgtgtccagtctcccaatgtagggctgtgggcagagactcctggctccctgaggaggggctgggggctggactcctgggtctgagggaggtggggctggggcctggactcctgggtctgagagaggaggggctggggcctggactcctgagtctgagggaggaggggctggggcctggactcctgggtctgagggaggaggggctagggcctggactcctgcgtctgagggaggaggggctggggactggactttcaagtctgagggaggagggactgagaggcatacaaaatccccataccttagtgagggccgggttgggctcagagaagtccccgccaggtgttccctgaaggcaattgagctcgagcagccggctccgttcctaccagaagatatggacagctacgtgtcaaagtcagaatgggctgtcccagctgctttccctaatgtcaggagacatctggggtgcagggaggtggtgggatgccccagggggaagtgaggacggtagggtagggcaggtgacaggtagctcacctgtgacagggcctgaagggcctcctccttcttccggctcaacccccggctctcggctgccatctgctcccccagtgacttgagctgctcttccaggacccggatccggtgctgcagagcacccctctgtcccggttactcatctgtcacggccccagccagctctccaggccaccctcccacagaaccacatctgcctggagggctggggtttactccagccactcccagagaccatgggatcggagtgtccagggctggggacccagcgttcagctccctggaccctcttcccttttgagggtccagaagagatctggggaagatgaagagaaagggatggacagagagaacagtaaccaagacaggccccaaaagacagagatgtagacaaagattcaggcaaaagaaaagatagaaatagaacagagacaagtagagacaacccgagacgaaggaaaagccagcgggagaggaaaaagatccagaagcaggtggggaaaggagacccaagaaaagctctttttttttttttttttgagatggagttttgctgttgttgcccaggctggagtgcaatggctcaatctcggctcaccgccacctccgcctcccggattcaagcaattctctgcctcagcctcccgagtagctgggattacaggcatgcgtcaccaccctcagctaattttgtatttttagtagagatgggctttc[132 bp omitted]tctgtgttaaatatggtcaaacatgcccattttttcccaagggtctcacaagtcagacccttgaatgtgaggctcccaggaaggatctgatgaagcatctttttggaatagaggcaaagaatgtggtggtgaataccaagtttgttcaaatcctggctgtggcgaggcacggtggctcatgtctgtaatcccagcatcttgaaaggccaaggtgggaggatcgcttgaatccaagagtttaagaccaggtgaaaccctgtctctactaaaaatacaaaaattatccaggtgtaggggctcgcacctgtggtcccagctactcgagaggctgaggtgggaggatcgcttaagcacaggacgtggaggctgcagtgagctgtgaacgtgtcactgcactccagcctgggtgacagagtgagacgctatctcaaaaaataaaaataaaaaaatcctggctctgtcccttactaaggaaacttggaaaagattacttaagcaccttgaccttcagcttctttatttataacgtgaaaaaaaaaaaacgtaatagaacttgcctcataagtttgttgtaaggattcagtgaggaaatgctcatgaaatattcaggaccatatctggcacatagtaaatgtttcattagtatcagctcttgttgttactattcagaagaacatgacaggcaggaaacaaggacagagaaaaaggcaggcacagagcaggggagacagagaggagcagcaaggggggcagcgctggtcaggcatgactcactctgtgctgcgccatgctggcctggagttcctggaccttggggtctggcacctggggcccagggctgtcccgatcctcctcctcctgccggctctcccgctccagttgctggaactccaggtcctcataggcacgttgggccacatccagttgttccctcatctataggtcggaacacaaaaagggtggaggcctgaatccctaagaccccagggagtagtgggctggggctgggactcctggtcagaggaagaaggtgactgaggacttggattc[142 bp omitted]accccgtctctactaaaatgccaaaaattagctgggtgtggtggtgcgcacctgtagtcccagctacacgggaggctgagatgggagaatcgcttgaacctgggaggcggaggttgcagtgagccgagatcgcaccactgcactccagcctgggcaacgaggcgagactctgtctcaaaaaaaacaaaaaagaaagaaccagatgccattacctcctgcacaccctgcagaagccgctcgcgttggtcctctggctgtgagtcgagctgtccctgggccttgcggagtctctggcgaagaccctctaggcgatcccgttcctggctcagccgcctctgttcctgaaagaacaacaaggttctcaccctcagcttaagcatagcgggagaagcagcagccagccatatctcagagcctgcctggggtgtcggctgtacaaaggcagggacttcatctatgtgattcactcctgtgcaggcctgcctcacagtcagcaccaagattttaaagaaatgaatgaggccaggtgtggtggcccacacctgtaatcctagcactgtgggaggccaaagtgggaagatctcttgagcccaggtgtttgagactagcctgggcaacatagggggagcccatctctacaaaaaaacaaaaaaattagtggagtgtgttagtgcacgcctgtagttccagctactcgggaggctgaggtgggaggattgcttgagccagggagattgaggctgcactgagctgtgtttgcatcactgttccagtctgggtgacagagggagacactgtctcgaaagggaaggaaaggagaaaagacagaaaagaaagaaagagagaaagagggaaggaacgaaggaaggagagagagaaagaaaagagggagggagggaagagaaagaaaaagaaagaaaaggaaaggaggagaaagagaaacaaaaaggaaggaaggaaggaatgatggaaggaaggaaagaagaaagaaaattaatgaatgcaaaacatattcatgttatgtgatacggtggatgcagaagtggattgtgtctgggccctgtcctccaagtgggaacacagccagttggaaagatcagggcagtaaaatccagagactgtgggaacccagaatgaagaacaatgtcagccagaggttgaggctgcagtgattgcactactgcactccagcctgggcgacagtgagaccctgtctcaaaatcaaaacaaaacaaaacaatcagggagcatttggatctgggaaaataaaaggagctagaagagcattttgggcagaggaagcggcttggcacaaatgcatgaaagttgaaaagtacaagaagtctgggggacaaactccagccagggtggaagaggatgtggtggtgggaagaacgtggtgggagaggacagtgggaaggccagctcgtccagctcacggggggtttggtcaacctggggatatggggagcctcagaaggactgaaaggatggggtaggagctaggaatcatccctctgggagatgggttacaggggtggagagcagctgcctcgggagtcctccaagcaatgagggtgagacctaagctggggcctgggcggtggggctgaaaaatagatggactagacagagaggatcaggaagcagaaaggataggacatggtggttgacgggcttggaggtgagagacagggaagtgtacagggcaaagtccaggactctggcctggtgaccaaagggacagcaagacaaacagtgtggagaagggagttgctgaggtcagccagactcctgggtcagagggaggaggggctggggcctggattcctggatctaaggaaggaggatctgggggtctggacttctgggtttgagggaggaggagctgggggtctggactcctgggacagagggagaaggggctgcgaccgagatttctggatctgggtgagaagggagtatgaagtagccagtaccctaggaagaagagcacatttctgtctcaggagagagggcctgggagaaatatgtgatctttgaggataaatgagggcctaggacccagcctcataaaattccaacatacacgacacttgcaaagaaaaaaactgacaaaatcacaagtcaccattttccaacctataatggtaactgacccaagcaatgaccactgatggatgttacaatcttcagataaaagattcttttttttgagatggagttctgctcccgttgcccaggctggagtgcagtggtgtgatcttggctcctgggagctgcaacctccacctcccggattcaagcaattctcctgcctcagcctcccgaatagctgggattactggtgcctgccaccacgcccagctaattttttgtatttttagtagagatggggtttcatcatgttggccaggctggcctcgaactgcggtggctcatacctgtaatcccagcactttgggaggccaaggcgggcagatcacctgaggtcaggagttcgagaccagcctgaccagcatggagaaaccccatctctactgaaaatacaaaattacccgggcatggtggtgcatgcctgtaatcccagctactggggaggctaagacaggagaatcgcttgaacctgggaggcagaggttacggtgagccaagatcacgccattgcactccagcctgggcaacaagagcgaaactgtgtctcgcaaaaaaaaagagactagggtgatcttattaggtcgggacaaccagagatgaggttcccaacactggctcaggaagcactaaagcacttctgaatacgatcaaacctctccctctaaccaacacccacttgcagaaacagaggcatgttcaagggcaccacaggcatgcgatcagccatgctctgcctataggacagaagactggatttttccaataaacagtatggggaagacacagcgggtaggaaccaccagagataaaacaatgggcaagacgtatcagccaatcacactgaactttggggacttcattcaaacaagccacctgttaactggcattttgagactgtctgggaaacacaaaaactaaccagaaataagacaatactaagaacttattaattttttatttttgagacagggtcttgctctatcgcccaggttggagtgcaatgttataatcacagctcactgcagcctctaccttctgggctcaattgatcctcccacctcactcttctgagtctgaggccacaggcacatgccaccatgcctggttaatttttgtatttttatttttcacagaaacggtgtcttattataatattgccaggctggtctcatagtcttggcctcaagcgatcctcccactttgccccgccccccgtaccccccccccaccccgcaagtactgggattacaggtgtgagccacttggcccagcctaaaaggatttcttatctgtcaatgatacactctaaacatatgtacagaccatatgatgtctgggattggcttttaaaactggggacgagaacaaattggagataatgaaacaagaatgtaagaatattaatcattgatgaagctggtgggcacaggacatgggagctgcctgactattgtggggtgggtttggaagttttctttttctcttttttttttttttttttttttgagacggagtctccttcttgtcacgcaggctgctggagtgcaatggtgcgatcttggctcactgcaacctccatctcccggattcaagcgattctcctgcctcagcctcccaagtagctgggactacaggcgcccgccaccacgccctgctaatttttgtatttttaagcagagacggggtttcgccatgttgcccaggctggtctcaaactcctgagctcaggcaatccgcccgcctcggcctcccaaagtgctatgattacaggcgtgagccactgcttccggccagtttggaagtttttacacacccacatttaaatagcaaacggacaggggacaaaggaagagccccaaaaatctcgcccagggagggagaaggaaaaccaggaggggcatctgcccctcactctctcaggagcccaaatgtcttcctttggggaatggggacaaccccggggcgcaggtggctaggagcacaccaacatccatggaccaggaaggacactgctgatgaagacccggtgagccaaacagacctgttcccgctgctggcggccgcgctgctccgaggccgcctgctgctccagcagctcccgcagctgctcctcctcccggcgagcggccactcgctccccagccagctcaccccgcagcaaggccacctccacctccatctgcggagagaatgccagggctgggggctcggacgcctaggtccaaggaagaggcccagggcctgaactaccggattcgaagggaggatggactccagggacctgaatttggagggaggaagagcggagggcctaaaatctgatcccacccgaggaaaaagctgggagtccggctttgcgggttccgcttgagttggggccaggcttcccaaggggtccgcagcctcacctcgatcctcagctccttcctctggcgctgtagctccttcactcgctgctccatcagggccacacgagtcaatgcctccagctgctgtccttgcaggcgccgcgccgcccctcgcaccccttcccgcgaagaggtggatgcgggaggtgtggccgccatagctatcggaggcgtagcctcgggctgaagttgaggggggcgtggttaagtggagatgcctcgccccctgcaatcactaagtaggtctggtccccacccaacatcaccctctgcgggtctcagtccatcagtccacttacctaacacaaccaccactcccataatctgtcgcaggctcttttctttttctttcttatcttttttttttttttgtcctgagatagggtctcactggctggagtgcagtggcgcgattacggctcactgcagcatcgacctccctcgctcaagcgattcttctgcctcatcctcctaggtagctgtgactacaggcgcgcaccgccacgccaagctctttttttttttttttttttttggcagagagggggcgatgctatgttgcccaggctggtctcaaactcctaggctcaagggattctcccacctcggcctcccaaagtgctacgattacaggcataagccaccgcgcccggcctcagacccctgtatttaaggtcggagtgggggagggtgcaagtcccgtgaccacccaaccacacggaccacagaggcttgcagtaccgtatggagggtgagcaggtgtaaagccgacttatgaaaggtgtttctttttctctatcaggtcctattctcttggcgtcactttcttgtagtgcctggatctgtctctgtctctccacctgaccccagtctctcagattcggtatctgtccactagatctgtccactagaatcactagatctttcttcctcggagtatgtccctctctcgaggtttttgtctatttgtttctctgagcatctctgccatttatttctgggtttccctctgtctcgattcccctctctctgactctagtctcactgtgtctctgtctttttggggtctttgtctctcagtctccatgtctctgggtctctgtctggcttcttgatctctctgcatctcttactcgtttggttctctctgttctgtagtctctcctgtctgtctatctggtctctctctctctctctctctctctctctctctctcatttttagagataggttctgctttgtcccaggctggggtgcagtggcgcagtcatagttcaccgcagcctacaactcctgggctcaagcgatcctcctgcctcagcctcccgagtagctgggattacaggcacgcggcactgcgcttggacaatttttgtattttttttttctctagagacagggatttgctatgttgcccagacttgtctcgaactcctgggcttaagcaatcctcccctcggcctccccaagtgctgggattacaggcgtgagccacctatctggttcctctatactagtctctctgtctctgtcgcccgtttgggtctatctccgttcttggggcctccccgtggctctatctggtttctgtctctgtatctggtttctgtctgtctgtgcctctgcctctctggctccgtgtcctggtgtatctctctctcagtagtctctgctatcactcggtctctctccctgtctccgggtctctgtctttctggtttccctctacctgtctacctgtctggccacctgtttgggtccccgtcggtccaagccccccgcgctgtcgccctcgggcccctcaccgcgtcgcggctgctctcagtgctgctgccttctcccacttcttcttcctctgcctgctgctcagctcccccgcggctcgaaggttccgccaggacttcggatgcctcctgttcccgggactcctcgggatggccctggggctggacctccacgtcgcattccgggaccagcggcggcggggtcccctcctcggggctgcttcgcgtccccatggccgctgggactcctgcggggtgggcgggaccagaagctccgggggcggggcctaggacggctgagcgccgctcgcgtctgctccggggcgcggagacccccccccaaggaggcggggcctaagagttcaaaggatggaactgagcgttacggaggcgtgtcctgaagtttccagaggcggggcttgatggctccaaggcgacacgccaccggagacgggaccggaatttgagtccgggtcgtagcacgccccctactgacctcttcgaccccgcctcccctccctcatctctaggtgtcaggccttgtaccctcccagcagccccctacaatctcttggattcgcttagagcgacccatcttctccctccgagactcagcagttcggctcccgccccatccttcccggagccccgtagtcttagtcccgaccccactgtgcagggcaaccgtgcccacgccgcctcacccagggatccaggagtcggggctctccttctctgaacaagccaggagtcggagtccttgagattccgaagtccaactgccacctccccacagcctcggccccctcacgagctcaggcttcggcgcgctccgctctgcgcgctgggcacggccgcttctgcctatgagacaggtggcaggggaagagggaggagagaggccgcccggtccccctccccagcagcccggaagtggaggggggacaacaggtccaacagctcccgagggaggagggagccacgggcttgccccacccgtggcctcggcatccggccatcccggccccaccggccccggcccggccccaccctcgtggaactcagcatcgcgacctcccagtctccctcgagcccctcattcctgcccccctggaggagtcttggccacctctgtatgggagcctctctaatgtccagaccttgggagttcagaaaggaaggcaggaatggagatggggacgtctcccctctaatgagcccttcagaagggccctgaccggtttggggagctggacaaggggaaggggtgccctgaactgagtcagacacctgcccagagactgagggaagtgtaccgccacccccccacaactttgctatggggtggagggcagaggttaaaggtctcagccagaccctttcctctctgggcgaaaacaggaaaatgaaaacaggaaaataactggtatatgaaaagggatgattagaagtcaagagctgtgtgaaacactttatacccagtcatttaatttcaccctcaaagctgtccagcgagaaagtgattactacctccatttctttttttttagtagagactgggtttctccaggttgcccaggctgatcttgaactcctgggctcaaacaacctgcctgcctcagcctcccaaagtgttgagattacaggcgtgagccaccgctcctggcctactatctccattttacacttggggatacaagctgaggaggacaaatgcacccaaggttggctgggcacagaggctcaggcctgtaatcccagcactttgggaagccgaggcaggtggattgcttgagatcaggagttcaaggccagcctgggcaacatggagaaaccccatctctactaaaaatacaaaaattatgccaggcgtggtggcacacacctgtcatctcagctactccagaggctgaggcaggaggatatctcgagcccaggaggtcgaggctgcagtgagtcttgaatgtgccactgcactccagcctgggcgacagagtaagaccccatctcagaaaaaaaaaaaaaaatgtagccaacatctacacatgttgtaagtggtaaaatgcaggcttcattctctcaaaagtccatgttcttaaccattgcgtatactgtcactacaagccaggaagtacccaaaagatcattctaaatgatagtaactttaatggtgaacactgataggccatgtgccaggcactcacacacattgactcatcagagcatcacaacaccccattattattccttccattttagagataagaaaactgaggcctagagaagtgaagtaacttaccccagggctaagtgggaagtggctcaaaagcaagccggtgttctaatccaaggtgatgagaagacctgccccagatagctgtgtttgtttttgatc[132 bp omitted]aaccctgtctctactaaaaatatgaaaaaattagccgggcatggtggcacgcgcctgtagtcccagctacttgggaagctgatgcaggagaatcgcttgaacccgggaggcagaggttgcagtgagccgagatcgtgccactgcactccagcctgggcaatggagggagactccatctcaaaaaaaaaaagaaaagaaaaagaaaacaaatcttgcaggctccctggcctctccataggaccagaaccccacccctttcggcccagaaacccaattggttcccccagaaaataggtagaagtcagactcacgttaaaaaaagttttatttagggagctccagggaatgcggtgggaaaggagaggtgcagtgtcattgccgccctctcctcccacctagtgcattaatagtggatgggagcatctgacagaagtgagatcaggcagtgggtgtctgcaccccacagcgcatgttggctggaacagcaaagtctgaaaggaagaaatcaaggttaaaactaaggggcctaggtagagttccaggccccactggagacccagaaatcctaggaacctttcctcttcaggaaactagagttttggtcctgagcccactccttccctcagacccaggagtccagtaccccagcccctcctccctcagacccaggagtccagacccccagcccctcttccctcagacccaggagcccagacccccagcccctcctccctcagacccaggagtccagtcccccagcccttccttcctcagacccaggagtccagtcccccagcccctcctccctcagacccaggagtccagtcccccagcccctcctccctcagactcaggagttcagacccccagcccctcctccctcagacccaggagtccaggcccccagcccctcctccctcagacccaggagcccaggtccccagtccctcctccctcagacccaggagtccaggcccccagctcctcctcccccagtccctcctccctcagacccaggagcccaggtccccagtccctcctccctcagatccaggagtccaggcccccagttcctcctccctcagacccaggagtccaggcccccagttcttcctccctcagacccaggagcccaggcccccagcccagcccctcctccttcagacccaggagtccaggcccccagctcctcctccctcagacccaggaccccaggcccccagcccctcctccctcagactcaggagcccaggcccccagcccagcccctactccctcagagccaggagtccaggcccccagcccctactgcctcagacccaggagtccagtcccccagcccctcctcccttagacccaggagtccaggcccccagcctctcctccctcagacccaggagtccaggcccccagcccctcctccctcagacccaggagtccaggcccccagcccctcctctctcagacccaggagtccaagaccccagcccctcctctctcagacccagaagtccaggtccccagctgctcacctatctgctgaggtttaggcaagttcaggttgcccatgattttgacaaactcctcacagctgagggtgagccgagggttcagagtcctctcctcctccacggtggacactgtgaaccctaggggccaagggaggggaaggaaagtcaaggagtctagtgcctcaggcctctcagaactacattccccaggaggccttgggtgcctctctggcaggggctcttcccagaatattcctaaaattgctttccctcctccatggacactatgggaaatttagttttcccccagttccctaagctccacaagtaaggcccaggaaaacccatgccctgcagaattctaggcatctggcagtcacatagtttctacatccacacacagcaggctcaagcactttatctctttttttttttttttttttgagacaggggcttgctgtgtcacccaggctggaatatagtggtacaatcatagctcactgcagcctcaacctcccaggctcaagcaatccttctaccacagcctcccaagtagctggcagcatgccaccatgcctggctaatttcttgtattttgtagaggcagggttttgccatgttactccagctggtctcgaactcactcctgggctcaaatgagcctcctgccttggcctcccaaagtgctaggattacaagtgtgagcccccttgcccagcctcaaacacttaattttttttggccagagaaatttctgagactggtcgtcttcatgccctacaaggattacagagatttacactccactttcaaagttatgtacgccccacacctcttccaggaagccctcaccatggtaatcgtgagcagggtagatcagacagtctcctggaagtgtgaagatcttttcatggaccgagtggtacaaggtcttggcacagcctggggaaggaaagatcagaggtcagtggatcaacaggacagaagactctaaccccttccttcaagaaaagggtaggaggataaaatcactatagctaaaccctctccttcgtgtcctgccaatatccctttgtctaagtagagaacagggaaaggcattctaggcagatggaacagcatatacaaagaattgaggaatgtcaagaaattcagcatggctgtaaatagggttggaatgacaccgtgaagcaccaaagagtgtcatttgtgaccttggctgtcacccaggggatgtcaagtaagggttctgaacaaggaaggtggactagaaggtaagaaactgaagacaaagccaggtgcagtggctcatgcctgtaatcctagcactttgggaggctgaggtgggtggactacctgaggtcaggagttcgagaccagcctggccaacatgacaaaaccctgtctctactaaaaatacaaaaattagccaggcatggtgacccatgcctgtaatcccagctatttgggaggctgaggcaggagaattgcttgaacccaggaggcggaggttgcagtgagccaagatcacaccactgccctccagcct[144 bp omitted]aaaccctgtctctactaaaaatacaaaaaaattagcctggcgtgatggcgggcgcctgtagtcccagctactcgggaggctgaggcag[136 bp omitted]atgaggcccaggaggagagtgtgaagccatggtccccacaagcagctctgagtcctaagtagggggcaaacctctattccaccttgcatttcggcctaaatccttcagcttcctgactgtactgtgaatggataaatgggagattgggagccttggagagaaaaagacagagactgagatgcagagataaggagagagggaagagggaggaagaggcctggggatgtggcttccacggccatctcatcatggcttctgtctttccctctcatccagcctcacctctccccacaagacagctaaattccaggcctagtgttaaccccacattcacacacatgctcaaaggatggcccaaccctgagattctgaaactatactcgctttctacagggaagctcctaaatctaactgcccctagcagctagactccaaatggatcattcattgctccctggcaattaaaccgctggctttaacaacttctttttttatcttttttttttttttttttgagatgaagtctcactctgtcacccaggctggagtgcagtggcgcaatcttggctcactgcaacctccgcctcctgggttcaagtaaatctctgcctc[134 bp omitted]gcctcccaaagtgctgggattataggcgtgagccaccatgcccagccctttgttttttttttttttttagctatatttgtttcttagagagggagtctcactatgttgcccaagctgggctcaaataggtaactaacacacccctgaatctaactgtcccccaacagctaagcccctgaatctaactcttcccatactctagcatgggggtccttaaccctgggtaccggtccgtggtctgttaggaactgggctgtgcagaaggtggtgagcggtgggtgagtgagcaaagcttcatctgtagttacagccactccccatcactcccgttaccacctgagctctgcctcctgtcagatccgcagcagcattagattctcataggagcacaaactctattgcgaactgcacatgcgagggatctaggttgcgttctccttatgagaatctaatgcctgatgatctgtcactatcttccgtctctcccagatgtgaccatctagttgcaggaaaacaagttcagggctcccactgattctacatgatggtgagttacataattatttcattatctattgcaatgtaataataaagtgcacaataaatgtaatgcatttgaatccccgaaactatgccctgccatggtccatggaaaaattgtcttccacgaaaccggtccctggtgccaaaaaggttggggaccactgttctagcaggtaaactccttgaatttaatactgaagccccctaaaagtctaatgtccatccattcattcttgtaacagatacttcaacacttgacacacacgtaactatatgaagatcttgggctggataaaggagctggtcaccttgctggaagtctgtccgcccacacccacggatcaacagggcatctccagtgaaggccatgctgtggtcattcaggacgaaggtgacacagcctggggtgtggccagggctggccctggtctccaacgcctggcaggggtggaagagtacagagatagtcaccaagaagccttctagatgaaactggcccccaaagccccaccctaccccagggtcttatctagataaacattttggtaaaaaatgtagattcccaggctgtaatcttatattatcagagtaaactccaagtggattaaagatttaaatgcatgaaaaataaaaccgcaaagctgtgacacacaacaacaaaaatacaaataatatctgacctctggttaggaaggtgatatggtttggctgtgtccccacccaaatctcatcttgaattgtagctcccataatcctcatatgtcatgggagggaccaggcaggaggtaattgaataatgggggcaggtttttcccatgctgtctcgtgatgatgaataagtctcacgagatctgatggttttataaagggcagttcccctgcacactctctcttgcctgctgccatgtaagacaggtctttgctcctccttcgccttccaccatgattgtgaggcctccccagccatgtggaactatgagtccattaaacctctttttctttataaatgacccagtcttagggatgtctttattagcagcatgagaaaagactaatacagtaaattggtaccagtaaagtggggtgctgctataaggagatgtgaaaatgtgactttggaactgggtaacaagcagaggtttgaacagtttggaaggctcagaagaagacagaaaaatgtgggaaagtttggaacttcctagagacttgttgagtggctttgaccaatatgccgagagtgatatgaacaatgaagtccaggctgacatggtcttacatggagatgaggaactttttgggaactggggtaaaggtcacttttgttatgtgttagcaaagagactggcagcattttgcccctgccctagagatctgtggaactttgaacttgagagagatgacttagggtacctagtagaagaaatttctcagcaggaaagcattcaagaggtgacttgagtgctgttaaaagcattcaagaggtgacttgagtgctgttaaaagcattcacttcagttttatgtattcacaatgatatggtttggaattggaacctatgtttaaaagggaaatagagcataaatgtttggaaaatttgcagcctgacaatgtgatagaaaaaaaaacccattttctgaggaaaaattcaagcctgctgcagaaatttgtataagtaacgaggagccaaatgttaatcaccaagacaatgggaaaaatgtctccagggcatgtcagaggttttcacagcagcctctcccaacacaggtccaaaggactaggagaaaaaatggtttcatgggcagggcccatggccttgctgttttgtgcagtctcaggacttggtgccctgcatcccagtcggggctaaaaggggccaagtacagctcaggccattgcttcagagggtgcaagccccaagccttggtggcttacacgtggtgctgggcctgctggtgaacagaagtcaagaacagaggtttgggagcctccagctagatttgagaggctgtatggaaatgcctggatgtccaggcagaggtgtgctgcaggggtgaagccttcatagggaacctctgctaggacagtgcagaagggaaatgtggagtgggagcccccacagagagttcccactggggcactgcccctagtggagctgtgagaagagggccatcgccctccagaacccagagtgttagatccaccgagagcttgcaccatgtgcctggaaaagccacagatactccacaccagcccgtgaaagcagccaggagtggggctgtaccctgcaaagccagaggggcagagctgcccaagaccatgggaacccacctcttgcatcagcatgacctggatttgagacatggagtaaaagatctttttggagctttaagatttgactgccccactggatttaggacttgcacggagcctgcagccccttcattttggccaatttcttccatttagaatggatgtatttacccaatccctggatcccactgtatctatgaaataactaaacttgcttttgattttacaggcccataggtgggagggacttgccttgtctcagatgagactttattttgttgttgatttttttttttttttggagacagaatctcactctgtcacccaggctgggatggagtggtgcaatcttggctcactgcaacctctgcttcccaggttcaaccaattcttgtgcctcagcctcccgagtagttgagactacaggcatgtgccaccatgcctgcctaatttttgtatttttagtatagacagggttttattattttgggaaagctggtcttgaactcctgacctcagctgatctgcctgccttggcctcccaaagtgctgagataacaggtgtgagccaccatgcccggcctcagatgagactttggactgtggacttttgagttaatagtgaaatgagttgagactttgggggactgttgggaaggtatgattggttttgaaatgtgaggacatgagatttgggagcgaccaaagtggaatgatatggtttggctgtgtccccacccaaatctcatcttgaattatagctcccataatccccatgggttgtgggagggagccggtgggaggtaattgaatcatgggggtgggtttttcccatgctattctcatgatagtgaataagtctcacaagatctgatgatcttacaaacggcagttcccctgcacacactttcttgcctgtcgccatgtaagccatgccttcactcctgttttgccttccaccatgattgggaggcctcccaagccaggtggaactgtgagcccactaaacccctttttctttataaatgacccagtcttgggtatgtcttttttttttttttttttttgagacagtcttgctctgtcacccaggctgcagtgcagtggtgcaatcttggctcactgcaacctctgcctccccagttcaagcaattctcctgcctcagcctcctgagtagctgggattacaggcatgtaccaccacacctggctaatttttatatttttagtagagatggggattcacc[138 bp omitted]acagaagggatattcaaatgtgatacctaaagtgataaatcattaaggaaaagatcagtcagaaggttctgaatggcagcaacaccataaacaaaatctaaagagaaccaatatgctgggaaaatatatttgtaacatatacataccacacagtggtcaatatacttaatatacaaacagatcttgcaaaccaattttaaaaaggtaagcacactaatataaaaatggaatacccaacagtcattaaaagcaataccgttgaaataaaattcaatgttttac[135 bp omitted]accccatctctactaaaaatacaaaaattagccaggcatggtggcacatgcttgtaatcccagctacttgggaggatgaggcaggagaattgctttaacccgggaggcggaggttgcagtgagccaagattgcaccatcacactccagcctggatgacaagagcaaaactccgccttaaaaaaaaaaaaaaaaaaagacagtgaaaaggtagccctcagagtggaaaatgatatttacaaacataaacagtagtccttccttatccgcaggggatacctccaagaacccagtggatatctgaaacctcagatagtacaaaccctataaatactgttttgttttgttttgttttggacggagtctggctctgtcacccagactggagtgcaatggcatgatcctggctcactgcaacctccccctcctgggttcaagtgattctcctgcctcagcctctcaagtagctagggttacaggtgcccaccaccatgcccagataatttttgtattttttagtagagacagggtttcaccatgtt[136 bp omitted]aagtgattaacgaatgggtaacatactcctatacagcacagatacactggacgtagggataattcatgtcctgagtgggatggtgtgagattttatcatgctactcagaacgatgtacaatttaaaacttactaattgtttatctctggaattttccattgaatatcttcacgctatggttgaccacagataactaaaaccacagaaagtgaaaccacaggtaaaggagttgtactggatccaacaaagttcttggatccggaatatataaagatcatctacaaatcaaaattactgggcagtttctactaaagctaaatctacacataccctgtggctcaacccttggtatacatgtggtccttgacttaagatggtctgacttatgatttttttttttttaaccagagtctcactctgtcacccaggctggagtgcagtggtgcgatctcggctcactgcaacctccgcctcccgggttcaagcgattctcctgcctcagcctcctgagtagctgggattacaggcactcaccatcacacctggctaatttttgtctttttagtagagatggggtttcaccacattggccaggctggtctcaaactcctgacctcaaatgatccgcctgcctcatcctcccaaaatgctgggattacaggtgtgagtcagccaccatgcctggcttttttttctttctttttttcttttttttttttttttttgagatagagtctctctctgtcgcccaggctgcggagtgcagtggcatgatctcggctcactgcaacctcggcctcctgggttgaagtgattcttgtgtctcagccttctgagtagctgggataacaggcacgcatcactgtgtctagctaatttttgtactgttatttagtagagacgaggtttcatcatgttgaccaggctggtcttgaactcctggcatcaagcaatctgcccacactagcctcccaaagtgttgggattacaggtgtgatgtgcccgatgactaacaatttattgactttacaataatgtgaaagtgatacattttatttctttttttcatttgtctttttttttcttcagtaaagatgggctctcactatgttgaccagcctggtcttgaactcctggcctcaagcaatcctcccatctcagcctctcaatgtgctgggattacaggcatgagccactgcaccaagccaaaagtgatacactttcaatagaaatcatattccatgcacccatacagccattctgtttttcactttcaattcagtattcaataaattacatgagatattcaacactcttgtataaaatacaaggctttgtgttagatgagtttgcccaactgtaggctaatgtaaatgttctgaccactttaaggtaaagta[144 bp omitted]gaaaccccatccatactaaaaatacaaaaattagccgaagccaggcacggtggctcgcctaatcgcgacactttgggaggccaaggcaggtggatgacctgaggtcaggagttcaagatcagcctcgccaacatggtgaaaccccatctccacaaaacatacaaatattagtcaggcgtggtggtgatgtctgtaatcccagctactcgggaggctgaggcaggagaattgcttgaacccaggaagcggaggctgcagtgagctgagatcacgccactgcactccaccctgggtgacagagtgagactccgcctcaaaaaaaaaaaaaaaattagccaagcatgccaagcgtggtggcacatgcctatagtcccagctactggggaggctgaggcagtagaattgcttgaacttgggaggcagaggttacagtgagcagagatcatgccactgcattccagcctgagtgacagagcaacactccgtctcaaaaaaaaaaaacaaaaaacaaaagtcaatatcctcagcttgggtgacagagcgagactgtctcaaaaaaaaaagtcaatatcctggggcaaaaggatatgaaactgttctagatccaaaaagatttttgataaataaaaaataataaataaataataaaaaagaaaacaaaacaaaaagaaaagaaggaaaaagaaaacacaaacacacacacaaaagagactaaatagacataatggccaaacactaagctcaattgtatcctggttcctaaaaacagccgtaggctgggcaccgtggctcacacctataattacagcactttgagtcaccgagaggggaagatcatttgagcccaggagattgagaccagcctgggcaacatggtgagatcctatctctaccaaaaaaagaaagaaaaaagaaaaaaaaagctgtaaaaattattcctcgggtaattggagacatctgaacacagctgaatatttaataatgatataaagttactgcatattggccggg[177 bp omitted]gctgaggcag[137 bp omitted]cgtgacaaaggttttgtaaaagaggaagtctcaaagtatagcctagagaaccctgacattctgcaaaatcaaaacgatttttggactttttgcccattttcactcgcattccccaaaaacatttgggggagaggggcgcggttctaaaagtttcatgac[132 bp omitted]gcaacctctacctcctgggtgttcaagtgattctcatgcttcagcctcctgagtagctgggattacaggagcgtgccaccatgcccggttaatttttgtatttttagtagggacggggtttcatcatgttggccaggctgatctcaaactcctgacctcgggtgatccgcacacctcggcttcccaaagtgccaggattacaggcgtgagccaccgcgcccggcctgtgcttgtgtattgttatattttgtactattatttcaatgtagattttaaaaaattcaaaataagaaattgtgggtggggaacatataacatcttgacctaaagcagccttcattgtccctgaaacttgtcgagtgatttccgcaacagcccagcctgcctaaccccaaattctttcaacaaattcattcttcccttccatgatgcatcatgtctgtgacacatccccagagcttttctttcatctgttgcctgcagcagctaaacctgaaactacccccatcaaagaaacataacccagaaggaatcctgtaaagcattcagcttgctggccttggagttcccacggcctacactgccccctggtggcaagtaagctctcagcttcttttccatttggttcccaagttctttcccttcattactcaaaactatagtaaacacctcttatctgcctgggatacatttcaagacccggagtggatgcctaaaaccgcagatagtacagaaccctacacactatgctttttcctatacatacgcacctatgatagagtttaatttataaattaggcacattaataaatcaataataactaataataaaatagaacaattacagcaaggcatgatggtgcacgtctgtaggcccagctacttgggaggctgaggcgggaggatcaccttagccagggttcaataccagcctggacaacatagcgagacccccacccaaaaaaaaaaaaaaaagaataggtcggacacagcagctcaaacctgtaatcttagcactttgggaggtcaaggcaggtggatcacttgaggtcaggagttcgagaccagcctggccaacatggtgaaaccccatcgctactaaaaatcttttaaaaatcaattagctgggtgtggtggcactcgcctgtaaatccagctactgctactcgggaggctgaggcaagagaatcgcttgaacccaggaggcagaggttgcagtaaaccaagattgtgccactgtacgccagcctgggcaacagagtgagactccatctcaaaagaaaaaaagatgaagtgatggatggttagagatgtacactgtaaaaaaaaattttaagcctggtgcagtggctcactctaatcccagcactttgggaggccaaggagggaggattgcctgagcccaggaggtcgaggccagcctgggcaatgtggcaaaactctgtctttacaaaaaacacaaaaactagccaggagtggtggtgcacacctgtagttccagctatttggaagcctgaggcaggaggatcgcttgagccaggaggttgaggctgcagtgagctatgattgcaccactgcactccagcctggatgacaaagtgagaccctgtctcaaaaaaaaaaaaaaattttttttcagcttttctctatgcttgaaatttttcataataaaatgttggaagaaaaattactcgtttcacaatgttaaaaggaggaagtattgaaacccacacttgagccacataagaatcaatggtggagcttttaaaacatgccaattccttgtgtccacccagaacaattaaatcagactctctgattctaagggacctgggggatcagtgttttcagcagtacttctctaagccagcatatttaacagcaaacctaactttctgattcggccaccctgtggcagctaagatgttcacttctcaatcagtttattaaaaaaagaaaacttgggccaggtgcggtggctcactcctgtaatccctgcattttgggaggctgaggcacgcagatcacttgaggccaggtgctcacgaccagcctggcagtatggcgaaaccccatctctaataaaaacataaaatttagccagatgtggtggtgcgcacctgtaatcccagctactggagaggctgaggcagaaggatcaccgaaaggcggaggttgcagtgagccgagactgcgccactgcactctagcctgggtgacagagtgaggctctgtctcagaaaaaaaagaattactcctgttttggcgatccactgccttgtagcgtcatcatgtattaaacagtcccctgctgtgtactttgtcccctgccctacacccctgctgtcttttgtgcacatgagcaagggtgtctctgggcttcacacctagaaggggaacctctgggttggagatcctgaaggcagccagctaatccttgaaacagcctcaagaggaaggtgctgtgataaaccctgtgttttagcgcagggaactgaggctcccagagggaggcagagattgcagtgagccaagattgtgccactgcactccaacctgggggacagagtgagactctgtctctaaaaaaaaaaaaaagaaagaaagaaaactcattctacaatgaaaccacttaaatttgtcccatcttttatgtaagatgaacaaccagttcaagaaactgggagtttctatgaaaattaaacatttgtcgactcagtgacccagaaaatccagtccttagaattcatgacaatgttccctaagatattagcagaagaatcttcatagcagcattattcgtggtagccaaaaactgaataatcagaaggaaaatagggtgtagtggctcatgcctgtaattcactttgtactttgggaggctgaggcaaggaggatcgcttgagcctaggagccaccacaacctgcccattttgtagggcaaaaattatggccagtggaccaaatttggcctgccatcagtttttgtaaggcctgtaagctaagaatcattttaactttttttcacattgaaaactatcaaagtaacatgtaaaaactagatggggctcacacctgtaatcccaacactttgggaggccgaggcaggagggttgcttgaggcctggagtttgagaccaatctgagcaacacagcaagactcagtctctacaaaaaattgtttaaaaattagctgggcatggtggcacatgcccatagtcccagctactcaggaggctgcggtaggaggatcacttgagcccaggagttggaggctgcaatgagctatgctcacgccagtgcataccagcttgggcaatagaacaagagcctgtctcaaacaaatttaaaaaaaaacctatatgaaatccaaattttattttttattttatttatttattttttttgaaatggagttttgctcttgtcactcatgctggagtgcaatggcaccatctgggctcactgcaacctccacctcccgggggaggttcaagcgattcccctgcctcagcctcctgagtagctgggaatacaggcacaccccaccacgcccagcttattttgtatttttagtagagatggggtttcaccatgttggtcaggctggtctcgaactcctgacctcaggtgatctacccacctcagcttcccaaagtgctgggattacaggcatgagcctgacctaaaatccaaatgtagaggccacaaataaagtcttattagaacacagccatgcctattcatttatgcagtgtctgtggctgctttcatgccacaataagagagctgagtagctgtcacagagaccctactacctgtaaaaactgaaaatatttactatctggtccttcacagaaaaaggtggccaactgctgctctatagcaataagaaggaaagaactccaagtataaaccaacatcatgtagagtggaaaaaaggccagacacaaaagagtacactgtataagtcctgtttataatgtcagaacaggcaaaaccggcctgtggttaaatgcatcagaagaatggtgccttaggagggcggtcattggccagaaagggaggcaaggaagacttctggggtgatgggcaagttctgtatcgggatctgggtaagtactcatacacatgtataatatgtggactcctttcattccatgaatgttaacaactcggttttgtttgtttgtttgtttgttgagatggaatctcgctttgtcacccaggctggagtgcagtggtgcgatcttggctcactgcaacctctgcctcccggattcaagcaattctcctcctgcctcctcagcctcctgagtagctgggattacaggtgcctcaccaccataccgcttaatttttgtatttttagtagagacagggtttcaccatgttggccaggctgatctcgaacttctgacctcaagtgatccgcccacctcagcctctcaacgtactggaattacaggcatgagccaccacacccaggctaacaattcatttttttaaagtagaaggaaaaataaaggagagaaaaatggacccccatctccaaaatctcagacaagccagccatggtggctcacgcctataatcccagcactttggggaggtcaaggtgtgcagatcacctgaggtcaggagtttgagaccagcctggccaacatggtgaaaccctatctctactaaaaatacaaaaattagccagacatggtggcacatgcctggaatcccagctatttgggaggctgagacagcagaatcgcttgcgctcaggaggcagaggctgcagtgaactgagagcttgccattgcactccagcctgggtgacagagcaagactgtctcaaaaaaataaataaaaatgtgcctgggcgcagtggctcatgcctgtaatcccaacactttgggaggccagggcgcgcggatcacctgagatagggagttggagaccagcctgaccaatacggagaaaccccgtctctactaaaaatacaaaattagctaggcatggtggcgcatgcctgtaatcccagctactcgggaggctgaggttgcgctaagctgagatagcgccattgcactccagcctgcgcaacaagagcaaaactccatctcaaataaataaataaataaataaaacaaaaaaatttgctgggcttggtggcgcacgcctgtaatccctgctatttgggaggctgaaacaagagaatcacttgaacccgggaggtggaggttgcagtaaaccaagatcgcaccactgcactctagcttgggcaacaaagtgagaccctgtctcaaattaaaaaaaaaaaaaaaaaaaagttgcctaaggctgaggggggaaaagggaaggataggggtgatggctaaggggtgtggggtctttttggagtaatggaaacattttccaattaatggtagtaatggatgtacaactctgaatatactaaaagtcattgaattgtgcactcgaaatagataaattatatggtatgtgggttatatcaataaagctattaagcctgggcaacatagtgagattacagctcaacaaaaaattaaaaaattagccaggtatggtggcaggtgcttgtagtcccagctacttaggaggctgaggcatgaggatcacctgagcccagaaggtcaaggctgcagtaagctatgatcccaccattgcactccagcctgggtgacagagcaagaccttttctcaaaaacaaacaaacaaacaacaacaacaaaaaagggtgggtgcagtggctcatgcctgtaatcccagcactttcagaagccctgtaatcctagcactttaggaggccaaggtaggaggatcacttgtgcccagtagttcaagaccagcctgggcaacataacaaaaccctgtctctacaagaacatacacaaatcagccaggcgtgctggtgcatgcctgtggtcccagctaccagggaggctaaggtgggaggatcacctgagcctgggaggtcaaggctgactgcactccagcctaggtgacagagacccagtctcaaataaaaaaaaaaaagaaagaaagaaagaaagaaaaaaaaaaaacactgaagctaaatctaccatagctaaacccttcgttcatttcaagacatgtttgttagcacctattatgtacaatgtacatacatgtacaatgcatttttgcctgcttccagagaaaggcttgaaataaagcttctgtaaccattgtagctgaactctcttcccacacacagccctcatttcctctaaacactctgactcaaatgaactgtccctatttggcaaaactctctaacctggaggctgtcttctgtcacctgacattctgtccccaaagtcagccaaactttattatacatctttagcaattgatcagaagaatgccctgccagctgtttccctctctctgagggcaactcccctggccctccctccttcggcctggttgcaattctggccggaaacccgctggtgcctgtggcaaataaagtgaggaaggcaggaacctttagacttcccagtgtgaggcaacggcagggctaggactagggtgaggctgttggtgcaagatttaaggaggcgctcactcacaggtgcggaccctgcacttacaggaccctgagagcgagtgcctccttaaatgttgcactccagggtcctcaccgtccttttcctagtcctgggctccgggttctaagcacccagatgctccttcctcaaacggaggtttccgcaagacaggactgggtctctttccttctcagccctgccctcagaattccagcccctaatcaacttttatggagatgcatgccaggccaaagggctgcccctaagctttaggaaggaaactccttaaatgctgttgacttaggagttccgccagtgccccacctgcccagagcctcttgccccagtgccccacctgggtttatggtgcccccctcccagaaatatgagctcaggggtcagaaacccaggtcctgaggtccctcctccccaaggactcaggatcccaggcccccagtcccctcttcccttaagtttaagaagtccaggccaccaccctcttggggacccagcacccaactcacgaagcgcccgaagcggatggagtctccatcctcaatgtgtaagtcagcctgggccccactaaggcgggagatgacagactggcagccagggaggagggaacggagcagccccgagcctgtaatgtggtccgcgtggcagtgggtattcactgggagagagaggagggacaggtccggagggtacagaaaggacctgggagtcccagcccagatccttctccctcagactcaggagttctgggccccagcttcccattccactgacgctgcagcccagccccgctgggatccatgagtttggtccccggactgaccagcatagagcagccgcagccccagctccttgatcagctgggcatcccgaggcgctgtttccaggactgggtcgatcagaacggcctcccgggactctctgtcacccagcaggtacgtgaaggtgcagctcacaggctcgaacatctgggaacgggggacccaggtgagggcgcagaaccggacttccacccactggaggccaagtagtccagactgaccctatcctcttcctaagatccagaagcagaaaccccagcccactctttccccgggagtcgggagtccggagccccactaccttcccctatcagaacaaaagagttccaacttcctaacatcccaaaatcagggtccccagcacgttctttcatagaggacccaggggtctggccccaagcccagaggcccccagaccactcacctttaaaggacccaagagtccagccctaaacctccaccccgctttccgcaagatgcaggcgtgggtccccccggatctctccctattaagagaccccggagttccgtccttgctgccgcctagtgcccagcagtcccctcctaggtccagccacccgcacctgccgcaggaggatgggggctccagacccgccgcgctggctcagctgccgccgggcgaccctcagtacagcctccgccatcgcgcccactgcggggtcaggaatgagcggaggccgagcgcctgcaggagccgggcgctacggcactgaccccgggaagggcggggcgggggcggagcacgccttaaaggggccacggacgcctggggcagagggcgggggaccgccgagcgggactggggcgagggcgagaccgaggaaagccagagtgcaatgcctggacgctttgagacccagaaaaaacagagaacagggagacactcaaagtgcgagggacagacgctcagagacacacagacatactcatgtaggaacagagatagggagagaagtagaaacccagggagaggccccagtacactcatagcctcggggccgttttttttcctttttcttttgttttattttgagacagagtctcgctctgtcacgcaggcttgagtgcagtgactcgatctcagcttactacagccttaaactcccgggttcaagcgatcctccaacctcagcctcccgagtagctgggactatggcacgttgccaccacacccgacattttatatatatatatttatatctatatatatatttatatacatatatatatatacacacacacacacacatacatgtatataaaatttgttttttgcagagacggagttctcactatgttgcccaggctgatctcgaactcctgagctcaagcgttcctcccaccttgtcctcccaaagtgctgggattacagacgtgagccaccgcgtcccgtggggccgttttctagcaggtggtaggatagtcatggttagaaaaagatgttcggttccgggaggcagaggttgcagtgagtagagatgacgccactgcactccagcctgggcgacagagggagactctgtctcaaaaaaaaaagatattcgttcggttccaggtcattaatatcttgagggacttttgagtgggtgcctggttaccagaacaacacttgatcccattaaagttcatccagaaattgcataagcattttatcaggaatgtttctctctttccaggaagaaatcttaaaaaaaaaaaaaaagataattttgcattatctcttgaataatcagattggggattattcatcttctgttggggtgtgaacctctgaaaagagcttgtgttcatttacaccaaggacctggggctgaaaaactgtagtctcaagtcatgagctgtcagaaagtctgctctttgtaatcgtagcagtagtgagaataggacatcccactctcatctggaggatctatgtcactttgtgacatcagagcagccttgatttccagcctaggggcagagcttttttttttttttttaattgttagaattttttttgtagaaacaggggtcttgctatgttgcctaggctggtctccagctcctggcctcaaatggtcctcccacctgggcctcccaaaatgctgggattacaggtatgaaccactgagttatcctgtcccacagcttctgaggaggggtttcctgcaacaacatttatcttaattctggagtttccagggaatggtccctggagctattttcagagcagcccctgtgtgaatgcctttacacagagaaggcctgcttttccttaagcctatcaaattgcttcattaaaattttatgtggccggctgggcgcggtggctcatgcctgtaatcccagcactttgggaggctgaggcgggcggatcacgaggtcaggagttcaagaccagcctgaccaacatggtgaaacaccatctctactaaaaatataaaaattagctgggtgtggtggtgcacacctgttatcccagctactcaggaggctgaggcaggagaattgcctgaactcgggaggtggaggttgcagtgagctgagatcgtgccactgcattccagcctgggtgatggagactccatctcaaaaaaaaaaaaaaaaaaaaaaaaaaagcatatggctgagctcatgcacaggcactttgagcactttgggaggcctaggtgggcagatcacttgaggtcaagagtttgagacagcctggccaacatggtaaaaccccatctctactgaaaaaaataaaataaaatacaaaaaaattatctgggcgtggtggggcacgcctgtagacccagctacttgggaagctgaggcatgagaatcatttgaacccaagaggcagaggttgcagagtttgcagtgatccaagattgcacctctgcaa[148 bp omitted]ggtgaaaccccgtctctactcaaaaaaaatacaaaaaattagccgggcatggtggcggatgcctgtagtcccagctactctcgaggctgaggcagaagaatggcgtgaacccgggaggcggagcttgcagtgagccgggatcgtgccactgcactccagcctggacgacagagcgagactccgtctcaaaaaaaaaaaaaattccaggcatgaggtctcatgcatgcctgactcaagctagacaaagctgaggacccagaggtgactcagtctggctggtaggcgagagaggtagggaaagcaggtctgagacacagggaggtgtagggatttggggaactcaggggagggaggagccagggaaaggaagaccctcaggcactccttactgagagggtcccccaaataagaacttctcgcccctggcaccctttcccgttgtttttgcagaatttctagaccatttatgtgtcctttgaagacacaccctaggcagggtttataggctcagctgtgagatgttctaagagttagacttggcttcacccttctcaggtgtaggaccttgggctgaaaacttatcttcttctgggttccagttttcttatctacaaaatgaggttgaaaatagttcaatagcctgacatagcacaggctctcaatgggaactgcccatcattattttgtcactatccttgactccttcctacccttgccacctccacccacttccaggccctgctgagttaaactctctctctttttttttttttttttttttgagatggagtcttgctctgttgcccaggctagagtgcggtggtgcaatctcagctcactgcaacctccgcctcctgggttccagagattcttctgccccagcctcccaagtagctgggattacaggtgcacaccaccacacccagctaatttttgtagttttagtaaagatggggtttcaccatgttggccaggctggtctggaactcctgaccccaagtaatccacctgcctcagcctcccaaagtgctgggattacagggccgagccaccgtgcccagccagatttaacctatcttaaccaggccacttttctgttatcacaccctctgccccattcaaggggcagcaaagcataaatgcaaattgcctggactgcagggccaggctgagggattcaaatcctggctctgatacttcctggctgggatgaccttcccctccacacttcattttcctcctctgtacaaggatgatagtagcacctcctcttaaaacattgctatggggattaaataaattaatgcacataaggacagtttccagtgtataataagtgctagcaattaatactgtaattaatatataacaataccctcactggtcttctggcttctactctgccttcttaaaatcatggttcttgaaaatagctgtggccctagaggttgggcgcggtggctcacacctgaaatcccagcaccatgggaggccgaagtgggcggatcacctgaggtcaggagtttgagaccagcctggccaacatggtgaaactccatctttaccaaaaatacaaaaaaaaaaaaaaaaattagccaggcgtggtgacgggcacctgtaatcccagctactcaggacgttgaagcaggagaatcacttgaacctgggaggtggaggttacagtgggctgatatctcgccactgcacaccagcttgggtgacagagcaagactccgtgcaaaaaaagaaagag[133 bp omitted]ctgggtgttgtggtgaacacctgtaatcccagctacttgggaggctgaagcaggagaatcgcttgaactcgggaggcagaggttgcagtgagccaagattgcgccactgcactccagcctgggggacacagcgagattccatctcaaaaaaaagagagagagagagaccgaagtgtcacttcaaactaatacaatgtgtggagctcatttagatcttaagtcaagcaaatcaagtgtaataaaaagatatttatgagatatgatgtttgacatttagcttcagaatcatttgggaagagtggatggggggtaaatcaaacaatactggtcatgagtgaataattattttaaaaactttttttttaaagatacggggtatcactctgttgcgcaggctggaatgcagtaacacaatcatagctcattgcagacatgaactcctgggtgagtccccactccctacccccgtgaaatagctgggactacaggctgccattaagccagactttttttttttttttttttttttttttaagatggggaggtgtctcactatgttgcctaggctgggatttttgtttgtttgggtttttggtttttttgtttttttgagacggagtctcactctgttgcccaggctggagtgcagtggcttgatcttggctcactgcaacctctgcctcccaggttcaagccatcctcccacctcagcctccggagtagctgagattacaagcgtgtgccaccatgcctgactaatttttgtatttttagtagagacgggttttcaccatg[138 bp omitted]cctctgcctcccagagtgctgggattacaggcatgagacagggagcccggcctaggcactttctagtctaaacactttccattgattatcatatttaatcctaaaaacgctccattttatagatgaggaaacaggcctagaaagagagctagaaagggtcacacggctagaaagtggcacagccgtattccaaaccagttacccaggcaatctggctccagagtccaaataaccccgccaaactcccagggatcgccagaccttgcgggttatcggactgagacccacccatgcagaggacttttatgggcatttcctggtcctttctgcaccaggcaggaaggtgcaccgccactgctcgggaagaatgctaagctgcatgccaccccaggcctggcaccaagagcatgggccagggcacctcgggaccacccaggcttccgagggggaaggtagatgggtgcgtggctgagaatcttgaatcacccaatagcgaggtgtgccaaggcgctgtgcaaataacgtgccttttattgggcactggctctctttgagcccggagtcccgcccccgccctctctcgaagaactggccagactttttgcaaacgccttgaagggtagaattagcagcgagctcttgaaactgcctctggagatggaactcagcggaattctcgaaaagaagagggacattaaaaagacgggtgcatgcactgatttccaagcgcagtttgtccatgttagtcttgtacatgcttgactccagtcagccaccgtaggccccgccaccggcggtgcactttctgtcgatacggtagcttcgcgcttgctcacgaacttgcctgcctggctggcgcacccagcccctccttccattccttcttccccctctctgcagcctctgccagcccgcactgcgcatgctttctgacgccccctttggtccagcgtgggaggaggggatggaaatgaggttgggctaagcagcttgcgcgcgctcccttgcctgccctcccccgacgccggacgcgcgccgggcggggcagctccgctggtccgagggcagtgcagcagcggcgacagcggctgcggccgtggccgtggcgggaggagccggaagccccgcccccggggaggggccgtcctgcaggtgagggcgcaggggttcgggcgcggatattggcttgcaggctgaatgccagaatcaccccgagggagatcggttgtggtccggacgcctagattctggagatgctggagggactgtgcattggtgccagagcctcgggagggtgcatcggtgcctgaatgtctgattccgaggggtgcattgaatcctttacgcttgggactctgagggaaaagtccattaggggtctctggaccgcgacgcatgccaggttccttccgtatcttcctccaggtcccccctctatcctccacggccccatccaagccagggatgaaatttaacggcaagaagggcgcagttgacgcggcgtcaatgaactgagactaagtcaaaagccgggtaaagctaggtcttcgacgtgaagccccgcccactgtgcccataggcccctcccctgggacggtgatgaaagacctgcccactccgctcgaaggcccccgccccctgggtctagtttcagaacaagactttttttgtacagccccgcccattccaggactgcagggtctggtggggaaggtcccgcccactctgcgcataggccccgccggctccgcgcttaagacggccgctgagttagttgtggagactccgcccactctgctgaaagactccaaccctgggtttagatagcgaagggactgcctctggcttgaatttgcatagccccgctcactgtgctcttaggctccgcctccccgctaagcctgcccccgccttagcatcccatacttgcagaccttgctcctaaacagtgtgatccctcattttaggccctccaaccctatccccatcagcctggtcatcaccggcgtcacccccgccccgcgccctgcccctaggttcctgtgccagcaagatgctggagcgaggcgcggagtccgcggccggggctaccgatcctagtcccactggcaaggaaccagtgaccaaagaaggtgagagtgccccgcctgtgagtagggagcattctccaggaacgggggccaaaataatcacattctgggggaatctcagggtgaaaatttgagggccctagggtgatgactatttgggatccccaaaactgccacattctgggaaatcctcccatttggctcagagagagcctcagtgaccatttgctaaggctcaggaaatgagccttacagaagggacgggtcagggatgacatgcgggatgtcagggtgatcactgggaagatactagaaacggataccttggtagctttgaggaagccttagtagctttggggatccaggaaagtaaccctttggagtccctcagaatgacgcctggggggaggggggagcagaaacatgcaatttggggagtctcaatgtgatgcttgaggtgcccaggtacacttggaggagccccacgaatatcaaagtcgtggcggagcctggcctaggcccagggcgttggctgcttcctggagcccaccagccctcctgtcccccagctccccaccagggcccaccgcagaagcccagccagtcagctccagggcccaccgcgtccgcgggctcgcctccccggcctcgccggcggcccccgccccagcgcccgcaccgctgccccgactgtgacaaggccttctcgtacccgtccaagctggccacgcaccgcttagcacacggaggcgcccgaccccacccatgcccagactgccccaaggccttctcctacccctccaagctggcagcccaccgcctcacgcacagcggcgcccgcccgcacccgtgcccacactgcccgaagtcctttggccaccgctccaagctggcggctcacctctggacccacgcacccacccgcccctacccgtgccccgactgccccaagtccttctgctacccttccaagctggcggcccaccgccacacgcaccacgccaccgacgcccgcccctatccttgcccgcattgccccaaggctttctcatttccctccaagctggccgcccatcgcctatgtcacgaccccccaaccgcgcccggcagccaggcgactgcctggcaccgatgctccagctgcggccaggcctttggccagagacgcttactgctccttcatcaacgcagccaccaccaggtggagcacaagggggagagagactgagccctcccttggctcactgtccccttctgccgccagccctagccagtaagaggtgggatttctaagaccgactgtatgagctcgcctcttccagatagctggcagagggcagggcaagggattggccatttatactgggctcgagctcagaagcccgaggaactctttgctcccctgctttggggagatctcaaaccatggacgtggagctgtggtttgacagcgctggctctgcttctccccacacacttacatggcaaaggtaaaaagtctgctactatcgtgggttgatgaggattgtgggcaaacaggctctcttgttaaaagtttaaactggtgtctccactttggccatatgacggtatctaagaaattgaaaatacatacatgcttgtctcaactcttccacttgtaggaatttattctataaactcatgaatgtgaaaaaaaagcatagtgttaagggtgttcactgcagtgcgactgttgtggccaaagactggaagcaactcaagtgcccaagaacaggggaccgactattgaattacagccatggaatggaataggtagccataggaaaaaaggaagcgctatatgtactgatgtggaaaaatctccgatacactaggtgataagagcaagaacaaagggtatataccactgaccatttaaagacattcaaaagcccaagcttcaggctgggtgtggtggttcacgcctataatgccagcactttggttagcttgaggccagttcaagagcagtctgggcaacatagcgagacaccatctctaccaaaaaaaaaaaaaaagctggctgtggtggcatgtaccttagtcccagctacttgggagactgaggaaggtggatcacttgagctggcaggtcaaggctgccatgagctgtgatggtgccactgccttccagtctgggtgacagagcgagaccccatctcaaaaagaaaaacaaaaaaagcccaagattcagacccatccctgacccacttcttacaagttgccaggccttggacaagctttgtcactcctctggattcagatgcctttgttgtaaaatgggtgggttataaggcatttgtaaggggcaagcaacacctcaggcaaagtcagttccccttatggagcctgtttctctcattataaaataaggatgaacaagctaacattggaatgttcttcattccacaaatactaagcacctcctgtgtgctggtccctgcatggggtgttggggacacagcattgaagacagaccttgtctagtgaggaaagtgaacactaattttaaaaagcagcagcagaccaggcagagtggctcaggcctgtaatcccagcactttgggaggctgaggcaggcggataacttgaggtcaggagttcaaaaccagcctggtcagcatggcgaaactccatctctactaaaaatacaaaaactagctggacatggtggcatgcacctgtaatcccagctacttgggaggctgaggtatgagaatcgcttggacgcgggagacgaggttgcagtgagccaaggttgcaccactgcactccagcctgggcgacagagagcctgcctcaaaaaaaaaaaaaaaagcagcagcagccaagtcattcattcatccatgtgtgtatgtatgtagagacagggtctatgttgcccaggctagtctgaacttctggactcccactttggcctcccaaagtgctaggattacaggcatgagccaccatgcccggccccaagtccatttagaagaacaagtaggagagccttggctccccaccccctcaacccagatacaagattacaaagctgtgcagtaatgaaattggtggtggtggcttgaaaacgggccagtggaagacaattgagagctcagaaacagacctgtgcttatgctgacatatgacaaactggacctgtagacctgggagtggcaacctttttctataaagggccaaagagtacagatgtcccctgacttaacaatggtttgatttcaggattctccaactttatgatgggttcatccggatgtagcatcattgtaagtcaaagggcattgggttttttttgttttgttttgttttgttttgttttttagacagggtcttgctctgttgtccaggctggagtgcagtggcacaatcgcagctcattgccctgaattcctgggcgcaagcgatcctcctacctcagcctcccaagtagctgggactacaggcaagcaccaccacacccggcttatttatttttgagatggagtcttgctttgttgtccaggctggaatgcagtggcatgatcgccgctcactgcaacctacctctgcctcctgggctcaagcttctcctacctcagcctcctgagtagctgggatttcaggtgtgcaccaccatgcccagctaatttttgtatttttagtagagatggggtttcaccatgttgaccaggctggtctaactcctgacctcaagtggtccacctgccttggcctcccaaagtgctggaattacagacgtgagtcactgcgcccagcccccagctaaattttttttgtaaatttttttgtagagatggggtctcactatgttgcccaggctggtctcaatctcctagcctcaagtgatcttcctgtcttggcctcccaatgtcctgggattccaggcgtgggccgccaagcccagctgcatctgttatatgtttaagttttgcaggccatacagtgtcttccacaactattccactctgccactgtagcaggaaagcagccacacacattacaatacataaatgaatgagcatggctgtgttccaataaacatttaccaaaacactaggtaggctggattttgcctatgggctatagtttgttgagccttgacatggatgagtggaggatggacagactaatcataaataaggctaagagacatggggaaaaattaagttgaatcccctggtatgtagaagaatgatcccccaaagatatccacatttgaatccccagaacctgtatgttagcttgcatgtagcaaaagggacattgcagatgtgattgagatgggtaagttatcctgattattcagataggcccaatataatcacaaaggtccttatatgggaaagaaggacgcagaagacagagagaggtgatcatgaaagcaaacattcgagtgatgaaaggccccaagtcaaggaattttgcctacaaagggcaaggaaataaattcctccttagagcctccagaaggattgcagccctgctgacacttgattttagcccaataaggctgattttggactactgacctccagaactataataaaattaacttgtgtagtttaaaaccactaagcttatggcaatttgttacagcaacaatgggaaactactgcagatccctacctcacaccatatgcaaaaacaagtttctgggagtttaagatctaaatctgaagagaagaactcaaaaatatttacatggaaataagaagaattatcttagtaactccagaagtagagacagtatccttaagagacaaaagaatgtaaatcatagatgaaaacatgggtaaatgtgaccataaatgaatgtaaagttatgactaggatggatgagatatagtattttaagagtgtgtacctggcatatcctattatacagtggaggttaggaaaggccttgttgaggatgtaatgtctgaactgagatctgaaagttgtggtggaaggagtgagagagtagaaagtgtccatagattggataaagaaaatttggtacatatacaccacggaatactatgcagccataaaatggaatgagatcacatcttttgcagggacatggatggagctggaagccattatcctcagcaaactaacgcaggaacagaaaatcaaacactgcatgttctcactta[131 bp omitted]tggcaaaacccccctctactaaaaaacaaaaattagctgggcgtggtggcaaacgcctgtaatcccagctactcgggaggctgaggcacaagaatcccttgaacccaggaggcagaggttgcagtgagccaagatcatgccactgcactccagcctgggcgacagagtgagactctgcctcagaaaaaaaaaaaagaacacatcaggggaacaacacacactggggcctgtcagggggtgggggtggggggctaggaagagcatcaggaagtatacctaatgcacgctggggttaatactcaggtgatgggatgatctgtgcagcaaaccaccatggcatgtatttacctatgaaacaaaactgcacatcctgcacatgtacccccgaacttaaaataaaagtaggagaaaagaaagtgtccagcctaagggctaggactgagcaggctgctgaactgcactctactcagtaaggcatttcggggaaggttttgggaggggtaagggttctactctgtcctcccaacccagcagtgctgcttgtatccacgtttatgcagagaactgtccggaagaatttctccaaagcaaccacaccagcagcaaaatttcaaagacacatactcatgtgagagggcgttgatctggtccaaccttacttttacagattggggaaatgaggccaggaaagatgagatttattggcaaccaaaccacagggcagtacctgagtctaggtggatcctaggtctcttgatagcctgacacccacccagctgttccttgaacacataatgctcgctcctgcctcggggcctttgcacttgcttttcctctacctggaagggctctctcagatactccttacttctcccaggtccctgcagaggggtaagtcctccaagaggccatccccaatcatcctatctataaactaccaggaccctgccattgctctgtcactcacaatgctctattttccttgctctcacagcatttcccactgtccaaggttgcattgcacgtgcaccatctctctccccctgtacaatgtcaggccaatgagatcggggactactgtttttttcatactgtcttcccagtgtcccccacatggtggctttggtaggcagagtaatggcctcccaaagatgttcacatcccagctgggcacagtggctcacgcctgtaatccagcactttgaatggctgaggcgagtgggtcacctgaagtcaggagttcgagacctgcctggccaacatggcgaaaccccgtctctactaaaaatacaaaaattagctgggcatgatggcaggcgcctggaatcccaggtactcgggtggctaaggcagagaattgcttgaacctgggaggcagaggttgcagtgagccaagaacacaccactgcactccagcctgcgtgatagagcaagactccgtctcaaaaacaaaaaaacagggagattatcccaaatgatctaggtaggcttaatgtaatcacaaagatctcttgttgcccaggctgaagtgcaatggcatgatctcagctcactgcaacctccgccgcccgggttcaagcgattctcctgcctcagcctcccacgtagctgggattacaggcatatgccaccacatccggctcattttgtatttttagtagagatggagtttct[139 bp omitted]cagaagagtcaaggtcagggtgatgggatgtgagaaggactcaacaggccattgcaggcctggaatatagaaggtgaatggaatgtgggtggcttctagaagctggaaaagacaagaaaacagattctcccctcaagcctccagaaggaacgcagccctgcctaccttgatttttagcccaaggatacccattttggacttcagacctccaaacctgtaagatcataaatttctattattttaagccactgagcttgtgataatttgttatagcagtagtacaaaactaacatggtgagttatcggtgggagtgtgaatgagcaaacgaatgagtgaacatgaagtctaaagccacccttagctgggcagtgtggctcaacacctgtaatcccagcactttaggaggccaaggcgggaagactgcttgaggccagaagttcgaggccagcctgggcaacatagtgagagcccatctctacaaaaaatagaaaatttatcaggtgtggtggtacatgcctatagtcccagctgctcaggaggctgaagcaggaggatcgcttgggcccaggagttcgaggctggagtgaacaatgattgcaccactgcacttcagcctgggcaacagagcaagaccctgtctctaataataataataataataataataataataataataataaaccaccctcatcttaaagatgcaaaaacaaaggtccagaaagagacaggagtgagactggtagcccttggttgatgaggcaaaagttgggaaagggcttggaatgtccaataaaaggttacccaaaggtcagatctcaaacctacctctgaccctggcctctgtcctgctcaaaccccctcccaaccttcccaccctcagattaaagtccaggcttctcagcctggagttcgcagaccttcaggccagccctgtccaaaagacctttctagactgatgcaaatgttctctgtactgcctaatacaatagccactgagcaattgaaatgcatggccagtgtgactatggaagtgaagtttacatttcatttcatttcattttaattaatttaaatagccacctgtacccagtggtgatcacactggacagcagagctgcaaggactgtgcctggctttctaaatctgcccccaaagcctctttgccaaaggcagcaatgctcttctgcctgcctcaggctgcttcccacctcctggcccatgctatggcctctgcctagagcaccatcccatcctctgccctgattccctcacaatcacctcaattcccacttaaatgtggtggagccttgaagggggtgcagggtttgggtaggttgcttaaaatgtcccttcctcccattctacctcctaaattaggtgatgtaaaaccacagtggtgacattcattatacagctacttctgaaaaccctggaggaaaggcactatccctggcctggggacgctgaggcttcaggagagagacaagcctcatgggtacccaggcctccagccacaaagggacagccaagatacaggtgtggctcagagggccagaaaaagttgaggggcagtgctgagggtcagattcccagttccctgcctcttgccaacacagggataaggggccaagcagaagagacaaagagttccttctctaccagatctctgacggaggtgcccagcattcttccccaggtcccagggagcctcttagagttttgggagactcttggatgagaaccaactcatctttattaaatgcatcgtgtgtgtgtgtgtgtgtgtgtgtgtgtgtgtgtgtgtatagcacatacttcaggcttgcggcaccaccccatagagctggtgaggaagtaacttctgcttctcattgcaactgtagatccatcggggacgaacgaatgccagggaggggttgtccatcagggcctgcagggtggggtggagtccatacgggaatgtgtcatcgaggggaggacggaggagatgcaaaggtgtgcccgggtctcccattctctgcctctttggtactcacctcctcaaagctgggatcccattcctgtgctgtgatcacaaactgaacccggtcactcatatagtcctcgagctccctggcgggagagaagaaaagaggtagaaggcacatcagggaatcagcactgacgtcctactccccagccactctcaatggctgtccccacactgtccccacctatgcgcctctaggttgcctctaggctccattctttcatgtatccatcttgccacagccacaatgaccagagctcccacagtggctaatcctcaggctgtccctttcagaagcaggggtaggggtagggatcctcgccatacagaagaggaaactgaggcaagcaatgcaccctgggctgccggtggtgggcaagctagcattcggattccatgacctgtgcccacctgctgggcatggcccttctccatcctcctgatggtcttctttcccacacccccacccctcccagcaggtccctgagcgttcccttggatccatcaccccttccccaccccagtccctggagactcacccattgaaggctgtgacgtatcggatgagtttccgccgctcgtccccagggaactccccgtaaagaaagaagtgcttgccctggaagaaatctgcaggagagaagggggctaaggtaagcatgaggccccaggagttcccaggcaccaaacaggagtgacgaggctgacccagcagctgaggagagggctgtccacatgtgggcagggattgatggcaggcagtggaccctgcccagcggcccatcagagcctcctggggaggtaggttggttggttggttggtttgctttaatggtagaagatacaatgcctattattgtgatttgtttctgaccgacaggctggagccacttacctctctctctctcttttttttttttaagacaaggactcactctgtcgcccaggctggagtgcagtggcgtgatcttgcctcactgcaacctctgcctcctgggctcaagtgattctcccatctcagcctccccagtagctgggactacaggtgcatgccaccaagccagactaatttttaaactttttgtagagagacggggtattgacatgttgctcaggctggtctcaaactcttgggctcaagcaatcctcccacctcagcctcctgagtagccaggactactgagtagcacaccaccacgctcggctaatttttaaaatgttttgtaaaggcgggggtcggggggggtctcactatgttgcccaggctggtcttgaactcttggactcaagcagtcctcccacctcggcctctcaaagtacggggtgagccaccacgcctggcctgcctggagccacttaatgagcttagtccaggctgaaaacgtcagtatctgccacttcttcacctttgctctcctttccaaccagtgcctttcttgttctgacctttggggtggctccttctttccattttaaggtgactctctaggccatcaatttgctgatgccactttaggggcttgggagaatcaaagcatcttcctgcccatcacccacgaggaactgggtggaaacggctcttctggaagccccagaaccacacctctgcacagcccgtgactgtctttcctctgctcccttcattctcgaagaagctctgcctccctgcccctcatcccacaactccctgcagagtttccccatttccttttgttcttattcttttacactggaaatgcaaacacacaatgtgtgcagacagcatccacgtccagagtgatggctgatgttaaagcagacactggtgtgcacccacccagggcctgacagagagcagtgcccctgtcacctggtgtgcccggcttcaccccagaccaacagaacggcacctgagcaagtgaagcactagcatgagggtggggccctcacccctgacgtgaaaaaaaggaggtcacacctggcacatggctgcgaggggagtggtcagaacaagaaatctggaggggagaaaaaggcaagtcacagagaggatgctgaaaggaaaggaacaagcctggcagaacctgaaggtgctgaggcagggagtgggttgaggaaggagaggggaggcaagacacgggggcagcagtgaccccagggctggccagggcaagtcccagctgagaactgagaagagaaaatgccacttcaggagggatggggggatttcccacctgggagctcagggactggcagatcaggaggctcctggtgttcctcactgtccgtgttctcatccgtggagcctgcatacgggtcttccccattctcctcctggccagggggcagtctgtgttccttctgctctgccaccctgggggtgccaagaggagtagagagtgagcatgcagagcagcctcccctacacccaaggccagggacaccccaacccccagccccagccctacctcctcagctcatcctctgtgtccccagaatcttccgccccattgtcctgtccttctgcaagtagaagctcagtcaatgcaaggctgccttgtctcctgggaagactggcagctctcccagtatggcacagacccaggcatctcatgcccccagcctcaactgccctccagatccagtcgtctgggcccccagcccctcctccctctgatccaggagtccaggccccagcccctcctccctcagacccaggagtccaggactcagcccttcctccctcagacacaggagtccagcccccagcccctcctccctcagacccagaagcccaggcccccagcccctcctccctcagacccaggagtccaggcccccagcccctcatccctcagacccaggagtccaggtccccaggctctcttccctcagactcaggagtccaggccccagcccctcctccctcagactcaggagcccaggccgcaggccctcctccctcagactcaggagcccaggccccagcccctcctccctcagagtctgacctgactgtaccccctcaatgtctatatcttcctggagcactggtgaggctgctttggtctcttcaggggttgggggcttctggggtgagctgggtccagctgcctgagtgggcttggttttggtctggggttgctaaggagggagagtgggtgggtgaggagggcaggaacagtgtgggtgtgttgggggggtacctgcaagaggcaagagtgggaagtttggggtgccacagcggactcatgtcatcctcccactacaccctcccccactggacagggggcatcagaccttctgaggaagcttgggggcttcatctccgctgccaccgctgtgagaggcctcatcctcctcactgctggaacctggccctgccatgaggtacctaggggacaaatcgggcctcagacaaacaggcccaagggaagtggggagggcgttcaggaggcaacagccattggcatttactaaaatactcactctagtgggcctcatggtcttgttcccagcccattctctcccagctcaggaaggccccagtgaacccagtcagtctggccacctgccctgcagacctgggtaccccctttcttcccctccctctttttttttttgagacagagtccattccatcgccaggctggagtgcagtggcctcatctcggctcactgcaatctctgcctccaggttcgagcgactcccctgcctcagcctccctagtagctgggattacaggtgcacaccaccatgccccgccaactttttgtattttagtagagacacggtttcaccatgttggccaggatggtctcgatctcctgacctcatgctctgcccccgtcagcctctgaaagtgctggaattacaggcgttagccaccactcctggccgcttttttttttttttagacaagatctcactctgtcacccaggatagagtgcagtggcgtgatcttggctcactgcaacctccacctcccagggttcgagcgagtctcctgcctcagcctccccagtaactgcgattacaggcatgtgccaccacgcctggctaattttgtgttttttgtgttgttttgttttttaagtacatacgaggtttcatcacgttggccaggatggtctcgaactcctgacctcgagtgatccacccacctcagcctcccaaagtgctgggattacaggcatgaaccacagtacccagaattcccctccctcttggggaagaaatgtctcaattcagaaaggaatgaaaaatcagaactttctcctttaagaatcaaaggcagtttctcattaggaaaatacccaccatttaaggggaaaatctcaaagcaaacacattttaaagactacaacactataatcatggttccttaagccactaacattccaggaaaaggattttcctagctctaacaacagtagcaggttcccgtccgggagggaggtggggggccagccgccccgtcgggggggaggtggggggccagccgccccatccgggagggaggtgggggggtcagcccccgcccggccagccgcccctccaggagggaggtggggggcgcctccgcccggccgccgccccgtccgggaggtggggggcgcctctgcccggccgccccttctgggaagtgaggagcccctctgcctggccaccaccccgtctgggaggtgtacccaacagctcattgagaacgggccatgatgacgatggcggttttgtggaatagaaaagggggaaaggtggggaaaagatagagaaatcagattgttgctgtgtctgtgtagaaagaagtagacatgggagacttcattttgttctgtactaagaaaaattcttctgccttgggatgctgttaatctatgaccttaccctcaaccctgtgctctctgaaacatgtgttgtgtccactcagggttaaatggattaagggcggtgcaagatgtgctttgttaaacagatgcttgaaggcagcatgctcattaagagtcatcaccactccctaatctcaagtacccagggacacaaacactgcggaaggccgcagggtcctctgcctaggaaagccagagacctttgttcacttgtttatctgctgaccttcccttcactattgtcctatgaccctgccaaatccccctctgtgagaaacacccaagaatgatcaaaaaaaaaaaaaaaaaaaacacaacagtagcaggttgacacttacatgggacttcctacatgccaggtagcacgtgacaaatactgagtcactgaatcctggggtaggtcctatttttggccccattttacaggtgaggagactaaggcacagagagattatttaatctgccctaagccacagggaaggtatgcagacacaaatgaatgtattagctccatttttctgagacatacatgttaagacccttctgcatttaatttggttgttttcaagctggtgaaatgctgtttaggtaagtcacactcataaaacggtgcctacaggagattcagaggatttaaaatgtagtagttcattaacagtcaatagcaggtttacttaactttttcttcaaagtgctctattcaaagattaaaaaaaaaactaaatttgtgcttattaggtatggagagtcatcctcttggggtcttccttctatagttgaatttttattttatttttattttttgagacagagtctcgctctgtccccaggctggagtgcagtggcatgatctcgactcacttcaaccccttcctcccaggttcaagggattctcctgcctcagcctctagagtagctggggctacaggtgtgcgccaccatgcccagctaatttttgtattttttggtacagatggggttttaccat[137 bp omitted]agactggagtgcagcggtgcaatcatggctcattgcagcctgaacctcctgggctcaagtgatcctaccacctcagcctcccaagtatctacgactacaggtatgtgccaccacacctggataatttttttcatgttttgtagggatggggtctcaccacgttgcctgcatcatatagttatttttttttagtttataaatgagtacaagccagaatttttaaaaatataaaatgctttgtgaattctttttgttaagaccagttgcaaatccaacactgtttgtctttttccctttctttcatgccctccttaagctctcccaggcagataataacccaaatctggttccttctgccccagatatagcaccagcccatcccctcttctgttcctgaggccccagcctactcaggagtccccacctgcagcctccccttgacacttcatccctcccaacagagcctgcccctgcccccatcaaaccttctgtgactcccctctgctcacaagaggaggcctctggagctggatgggcttcagaattttgaatctttcaggttttagagaggcaaatggctggcatacagattgttacataaactcccaggagggcctgggggagcaccccatgatcaaacccactaatatttctgcagttaagaccatgacacacttaaggggataaaaaaaaaaaagtccgcaaatagcctcacattagttcaggatgactgcagcgaaatgagtttgtgctgaacctagaaaagaactttcagcttctagagatgtttggattcctgaataacagatgagggttctgtgaagctgcatggagcccagtgtgtagcctgggctccggaagccccttctgacctgagcccacccacctcacagcctcgctatcccccaaggcaaataatttctcaaatacaccaggtacaactaacttctgaacacactcaggccatggagtacaatccagtctcccctccaattcatggacctcagatatgagctagcctttgctcagtccaaagccttctgtggttcctaatgccccagtcccatttttcctgccacttcttgcccctgtgtaagctcagcctcacctacaactccaggcagacaacaggctgacctgaccttgtctcctctgcccagcatgttctctgcctctgttcagcctgaaaaacctctcttggaccttgaagacccctcgctctctgcgggccaccctgtggggcttccactgcactgttacaacaattctgatccctcatcaaagtgagaagccttcaagggcagggctcaatgactggatcctcagccttgcacattccagcctggcaccaagcaggggcttctgggactcattttggtttttgggttttttttttcttgttgagatgggagtctcgctctgtcacccaggccagagtgcagtggcacgattttggcttccaggttcaagcgattctcctgcctcagccttccgagtaactgggattacaggcgtgcgccaccaagcccagctaatttttgtgtttttagtagagatggggtttcaccatgttggccaggctggtctcgaacttctgacctcaagtgatccacctgcctcagcctcccagagtgctgggattacaggcgtgagccactgcaccgggactcactttgaatgaatgaatatggaccctaacacttgttctcccacccctgagtttttgcacaaactgctcctccagccttttctgataagcaggcttcacagagccctctgtgacctcccaggcaggtcctccttccctcatctggagtaccccagcccctgccccgctcctctcagtagtctgctggctctgggctgggaccacctgtgttctccgctggcaggccccagtctgactcccctccagattcctggcattgcccagcacaggataaggagcagggttggcgtgtgaggccttacctctgggagggcagccgccgacgcatgcggtgacagtccagcacccactccttacgcacgatgcggcctcccaggcctaggacctggctgtacttgggggtgttggcaaaggcacagctggtggggggcagaagtgaagatgccagttaggtgtgatctgaggggcaaaggggaacgagacaggggagacagacagagagagagagagacagacagacagacagatcatgagattgaggtgggagaaacaaaaagaggttggagaccaagggagagatgcaaaaatcagagagaagacaaaggctacagaatgcagtgagaaagaaagcaagtgagagagagagaaagcatgcagcatagtggacacagagaaagcacaaggtggaggagacacagggagctgggggagaaactgcagcggcgcagggaggggggcgcaagcctacatgaggtgcgtgctgtcccgggtccagtctggccgatacttggccccaagctctagggccttatctcgcagctcggagcggaaggggttctggaagccactcagcaccactaccacaccctgaaggatcttccccagctcctctgggccagctcggggtcgtctgggctcggtgccttctcctcggggtttgcctgtcactgccccctgtgctcgggcagggactggggctgtggctggggtacgagttggagctggcactggagaagacaaagagtagattaggttagcaccactgggggtcaacccccagcccctcctccctcagacccagcagtccaggccccagaccctcctccctcagacccagcaatccaggccccagcccctcccccctcagacccaggggtccaggcccccagcccctcctccctcagacccaggagtccaggcccccagcccctcctccctcaggcccaggagtccaggcccccagcccctcctccctcagacccagggatccaggcccccaacccctcctctctcagacccaggggtccaggctcccagcccctcctccctcagacccaggggtttaggccctcagcccctcctccctcggattcaggaatccaggcccccagcccctcctccctcagacccaggggtccaggcccccagcccttcctccctcagattcaggacagcaggctccagccccgcttcccctaggacacaggagcacaggcccctgtggaaacaagggatctagttagctcacatttaggtctcttgggaacagatggcgacagctgggctggtggtttgctgggggtcttcttttcttcttggttcaaatccaacttcctcttccctttgggagactcctggggctgaggggatggggatggattgaggcctccagcttctctcctcctccaccccaccaaagtctgatgatttcaccttggaggtgctgcctatggccctggagactggagaggctgaggaggcagcactagaagcctggagggtagcagctgcatagctaggtcctgctgggtcgctggctgtgactatgaagggagaaagtggatccaggatgagagggctgagccccaagaccctttcactcctatctatgggacacagaatattgttgccaaaacccaccagtgatccaggagtcccagcctccagacctctcaaccctcaggacacaagaggccaggcccaccttcctccaccctgagacccaggagtccaggactccactaccctcctccctcagacccaggaatctgagccccagccccctctaccctcagacccacgagtctaggtctcaaccctactcactcaggacccacgttgtccgagctcacctggggatgtcttgttgatccggctgaagaagagagcccccggcctcagagagttggcgctctcatcctcctccttcacacggaactggccaagcttggtcactgtcaccttctaaggtcccgcaaggtcagtattataggtgggctgctggcaggtgggggtggagaggcagggagaaggccatggggagtgacaggtacagcttacctgggacggggcctctgcctcatctttgtctggggggctatgaaaccgtacaaaactcaagccaaagggggagtcctgggaaaggaggggtgggagtcagggagtctggcccaaggacagaggccagggcccaagacccttttcactcagggaaacctcttcctggctccttccctctcatgaacacccatgttgaaggaggggccctggcgatggtgatgacaattataggattaagctgttatgactgagccctaactctgagtctggctccaagcccttttcacgcattagctctttgggcaattggcagagtctactaggtgtcccagcgaattcactgccctatgcacaaactcctgcctgtggaatgggagggagtgctgcgtgccacttccagaacacagaagtgttccaggctctctcctctgccagctggatgcagagccagaaaataggagaagtctgggtccctgcacgacctcataaggagaagccagctgacaggctaaacactccccaggacagttacctgggcaagaagcacacctttagtgtgtggcatcatcacatactccagtctcactgttaccacagcttttagcatcccttaacctacagcaaccctgtaaggatcaggcaatggaggcccagagagcgtaagtcacttgcccaagatcacacagctaaaaagtggtatagccaggacgtgaactcagtaatcagacgccagatctcctgatgttaactactaggcccactctactaggccacctctctaacaagtcagttcccctcctccgattcccctctgagatgctgcagttcacccttcctagattcctccgggagatgaaacttctcattacaggaaagatcccaaacccatttcagggaacgcagggacccagcctccccataatcccatgggacaccagctgtctactcctcccagccctatgggactcaatattggcccttatttccctccttgcccaggaccaaggactctgcaccctggctcccaccctaggtaccttgctgtagggctggctgcaaacaattttgacccggtcccagcgcttctcggcggctgcccggaccagcttgtcaggcccaaacatgcgaacgcggttggggtttgagccactgcggctctcggaaggggacatgaaagatgaggtgaccagaaggacctgggtgggagaagccacagtgcatgagaaccagggcaggttggcttagatgagagcttctaggggctggggaagagggcacagggcccacacaggggactgggagtcactagaatgtagcttgggcctagatgtctccagaccctttgtttctaggccttgagtcagtcctgccctgacacaggccccagagggatctctttatcctccagatgtgagcgacccttatctaaattctcccatggagtcttccatatctggcaatacagcgggctacatgtcctaaggaactttcccggcagagaatattcagtaaactggcacaatattcaaacaccttttggaaatgcacaggtgagtcagcggaaaggcaaggggaattactagaggctggaaatgagaaaacagaatccagagagtcaggcgagctgcactaagtattaagtgattgtttctcagctcaaacctaccctctacaactcatctctgtgatctgggcccgcacttggcaaaccacctttctgcttccctagctgatcgtgaccaggctctgccaatagggggggcaagagagagagtttgcaaggctgcaggagggaggaaggaccagcttctcgtgcattgcagatcctgtgagcatcacccccagttaagcttctgctgctgcagtggttcctgcctgcagcagcagatgaatccagtttgcagtgtcccaatacctccagaaacagcctcattcagcccctctcagcagccggtgggggaggaagccctcctcaaacgatctgaatttcagctcctggagccccacctcccagtttccaaacatctacgtttcaataattcctgctcctttcttttgttcccccaaccctgggagtggtagctactccctgcggttgcttctccctcatatcttagtcttctagtaacacctagttactggttctttctatcaaattatctgttaaaataactggtgtggttttaatctccgggcaaggaccctgactgacccggcagcactcatgttggtagtttgtcatggtgctgatcccagatagcaaataacttgattttatttattattattatttttttaagagacagggtctttctctgtcacccaggctggagcacagtggtgcgatcatagctcactgcagcctcgacctctgggtctcaagtgattctcccaccttggcctctgagtagctgggtctagagatgcacgacaccacacctggctaattttttattttttgtagaggcatggtcttgctatgttgcccaggctggtcctgaactcctggcctcaaatgatcctctcacctcagcctcccaaagctatagaagtacaagtgtaagccaccacacccagctagaacttgatctttaagggttatgcacgtggtggtgaaagagaacaagagagaaaacctaggctccaagcaagggagagtggcatctcagagatcctcaccacactgcatagaactgaggactccccaaaggcaacgcccacactagttacatgaaggggaaataagcctgtggaaagagtccctgggaggcctgtctgtcttggccttagcttggggggacaccaaagaagaggtgaaaattcttctcgggagaactcctcacaagtctgttctctcaaggaattgagagt[140 bp omitted]atggtaaaaccccatctctactaaaaatacaaaatttaagccaggcatggtggcagacgcctgttgtcccagctactcgggaggctgaggcacgagaattgcttgaacccaggaggcggaggttgcagtgagctgagatcgcaccattgcacttaagcctggtggacaagaggccaggagttcaagaccagcctagccaacatggtgaaacaccgtctttactaaaaatacaaaaattagctggacatggtggtaggcacctataatcccagctactcgagaggctgaggcacaagaatcgcttgaacccaggagttggaggtgatggtgagccgagattgtgccactgcattccagcctgggtgacggagcaagactctgccaaaaaacaaaaaacgaaacaaaaagactgggca[133 bp omitted]catggtggcgcgtgcctgtagtcccagctactcgggaggctgaggcaggagaatcacttgaacccaggaggcggaggttgcagtgagccaagattgcgccactgcactccagcctggcaatagagcgagactccgtctcaaaaaaaaaaaaaaaaaaaaaaaagatgaatgcagccacttttggttgggtatattttgttactgacttagtctcttttctaactgacatgctgtgaaattataaaattggacaataaagccttttgctgagaaaaacagaacataactatagctctctttgtgcacagctgattatgcaaaggaaacaagaaagacaattatacagaagggaagttttcttcctgaccttgactatacttgtttataaaaggcctgatttggagctgacagggaagctgcatttatcatctggtgactaacatgggaaaaccctgtcctactaaatacaaaaaaaatagccatgcatggtggcacaggcctgtaatccgagctacttgggaggctaagatggagaatcgtttgtacctgggaggcggaggttgcagtgaaccgagattgcaccactgcactccagcctgggcaacaggagcaaaattccatctcaaaaaaaaaaaaaaaaaaaaaaaaaaaggaaggagggagggaaggaggggagggagaatggaaggaaggaaggctcctgtgactttgggtttgtgcctttgatgtttttgaagagtagaggtcagtgatttttgtcagatatcacttattgtacaaagtatctgatgtttccttgtgattaatttaggttgcacactttggccagaataccacagaagtgatgtgtaatatacagtttattttgtatattgacttctcatcttgtgaccttcacttactaaaccttgtagtttgtctagatctcttgggattttctgcatagacaatcatgccatctgtgaaaaaagatagttttcttttttctttttctcaccttgtcacactgactagtgcaaagttgggcatggtggtgcaagcctgtagtcccagctacttgaggggctgtggaaggaggatcacttgaacccgggaggacaaggctgcagtgagctgagatcgtgccactgcactccagcctgggtgacaaagtgagacctcgtttcaaaaaaaaaagagtaggccaggtacacacagcagctcacatgtgtaatcctagcactttgggaggccgcagcaggtggatcacctgacctcaggagttcaagaccagcctgggcaacacagtgaaaccctatttctacaaaaaatatttaaaaattagccgggcatgatggctcccactagctacttggggggctgaggcgggaggatcacttgagcccaggaggcagaggttgcagtgagctgagatcatgccactgtactccaacctgagcaacagagtgagacccccatctcaaataaataaataaataaataaataaatacatatatacataaataaataatatggttaaaaaaagagacagtttggtattggcataaagaaaactatacatatcaatggaacagagaagagagtacagaaataaacccatacatatggttaattaattctcaacaaggagtcaaaatgattcaatgagaaaaggcaagtctttttttttttttcaaagtattttcagccaggtgcagtggctcaggtctgtaatcccaatactttgggaggccaaggtgggaggatcactttaagctcaggagttcaagaccagccaggcaatgtagtgaaaccccatttctacaaaaaattttttaaaaaattagccgggtatggcggctcacacctatagtcccagctactcaggaggctgaggctggagaatcccttgagtctgggaagcggaggttgcagtgagccaagatcatgccactgcactccagcctggccaacagagtgagactctgtcttaaaataaataaaataaataaataagcattgtcaacaaacatataaaaaagatacagaaaagggccgggtgcggtggctcacacctgtaatcccagcactttgggaggctaaggtgggcagatcacaaggtcaggagatcgagaccatcctggctaacacagtgaaaccctgtctctactaaaaatacaaaaaattagccgggcatggtggcacgtgcctgtagtcccagctactccggaggctgaggcagaatggcgtgaacccgggaggtggagcttgcagtgagccgagatcgcgccactgcactccagcctgggcaacagagtgagactccatctcaaaaaaaaaaaaaaaaaaaaaaaagatacagaaaaaataaaccttatcccctgcttcacacaatacacaaaaattcacttgagatgaaacagagatctaaatgtaaaatctaaaaatagaaagcttctagaagaaaacataggagacaggcagaataacagctcctcaaagatgtttacatcctaatccctgaacctggaaatgtggcagaaggcactttgcagatgtgatgaacttgaagatgttgaaatgggggagatgcccctggattatccgggtaggccaagtgtcatcataagggtctttataagaaaggagggctgggtgtggtggctcatgcctgtaatcctagcactttgggaggctggggtgggtggatcacttgagcccaggagtttgagaccagcctgggcaacacagtgaaaccctctctctataaaaaataacaaaagctagccaggagtggtggtgtgcacctgtagccctggctacttgggaggctgaggtgggagaatcacttgaacctcagaggcagaagttgcagtgagctgagaacacgccactgtactccagcctgggcaacggaaatg[223 bp omitted]ggctgaggcagaagaatagcttgaacccgggaggcagaggttgcaaggagctgagatcgcgccagtgcactcactccagcctgggcgacagagcgagactccgtctcaaaaaaaaaaaaagaaaaagaaaaaaagaaggcaagagagtcagagttggagaagtaacaatggaagtggaagcaggcgttagagtgacaggagtgctggctttgatgaaggaagggtcacaagctgaggagggcagatggactctagaagctgaaataggcaaggaaatggattctcccctagagcctccagaaggaacagggctctgcctacacctagattttagcccagtgagagtgatttcagacttctgacctccagaacagtcgaataatacatttgtgtcattttaagccatgatccaaacttgctctcttccctgatgtgcagtttaccgccctgtgtctgccttctgtctcctccgtacactgggtgatcctccagagggcagcaatcaggtgtgactcacatctgccccatgtcttcccagccccagcccctgggggagacggtgatgcgagcatgaggggcagaggtcagtatgggatccatctcatagccctgcttacctcatagtcttgctccccagcgcctccagctgaactgcccaccagcacctccacgaaagctgagccatcattcccaatgtccacactgtgtatctgctcctccttctccaactgtgggcagagagagaggccactgtcagtgcctgctctgcctctgggctcactgtgggacctcaggatgaatctcctttggatcaccatgtccctgtaatgtcaattctgtgagggggcacaccagggttgaatggtgccatgtgtcccctccatgcagcacagggtatggcatggagcagaaactcacaaaatagtcactgaatgaatgcatacgcgcccacctcacacatacctgcttccctgacctctccagactccaccaggtcagcttatcacacactgccatagagctctccttgataagcacttgccagagttataactttattcaaatcatcatgcagacaaacagcacatgtcacccctcacccacaatcgcagaggactccaggaaacctccctgagggcaggggctttgtccgatcttgctcaccgctggttcctgggtttgaatcccagctgtgctgcacactagctgtatgaccataccagttaaccttttggagcctcagttttctcatctgtaaaatgggaatgaccaccatatctaggatcatgcacataaataatggccacagggcatggcgaagagtaggcaattatctgctgtcagtcaggaggtattattagtcagtgctagacaactatttgttgaaagaagaaaagagctacctataggagggctcatctcaaaggatctgccattcctgtctgacagatgaagatgcagaaagccgtgcgggccatgcgggcacgggaggcagttaggttgaggcaagtgtcctgccttccagtttggggctcttttattaggatcctagaatgacgcattattacaactctcaaaggtacctgggccaggtgcagtggctcaagcctgtaaatccagcactctgcgaggccaaggcagtggaccacttgaggccagcctggccaacatggcaaaaccccttctctactaaaaatataaaatatagccgggcatggtgacacatgcctgtagtcccagctcttcaagaggctgaggcacaagaatctcttgaacctaggaggcagaggtttcagtaagcagagatcatgccactgcactccagcctgggtgacagagcgagactctgtcacaaaaaaaaaaaaaaaaaaaaccaaggtacctagtccaccctacactgccctctcccacccctggtgatgacagatgctccaatctgctctgttgcctccctgtcagatcatctagacatcacctgcacactgctatcaacaggaacaccactgtatggaaggagggagcctggacttggggtgaggtaggcctgggctcaaatacagcaatgccatttccaacctgcacaaccttgggtgacgtattcaacgtctctgtgaggcagtttcctcacatgcaaaaagggaagatggtcattaacaaccctccctccttggccaggcgcagtggctcacgtctctataaccagcactttgggaggctggggtgggaggatcacttgaggctgggagttcaagaccagcctgggcaacatagccagaccttgtctctacaaaaattacaaaaattagcaaggcatggtggcacatacctgtggtcccagctactcaggaggctgaggaaggaggatcgcgtgagcctggggaggtcaaggctgcagtgagtcatgttcgcatcactgtactctgggcgacagagtgatgagaccttgtcttcaaaaaaaaacttaccctccctctgaaggaagttgagatgacacagaattaacaactataaccacaactgcggccaacatccgagtgcactgagcgctcctggtgtgccagactcctgctaataatacatgtatctactctcctgcaatggctctgccaggcagttgctataattatctccatcttacacatgagcaaacggaggcaggaagtggttatgtaacttcacagctggtgggtggcaaagccggaccggaacccaggcaggctggcaacagtccacgcgtgctcctccatcacaccactgacgtgctagaggaggaagatggtgctggaggaagggcctgcctaaggctgaggccggcagacctcctgctgactcccctgcctccaccgccattcccagccctgggccctgggcagtgtacagtgctgcctgggctcatgagatgtcccagtctgggccaggtgtggtggctcacacccgtaataccagcactttgggaggctgagacaggtgaatcgcttgaggtcaggagtttgagactagcctggccaacatggtgaaaccctgtctctactaaaaatatgaaaattaaaattagccgggcatggtggtgagcgcctgtaatcccagatactggggaggctgaggcaggagaatcacttgaacccgggaggcagaggttgcagtgagccgagattgtgccactgcactccagcttgggcgatggagtgagactctgtctcaaaaacaacaacaacaacaaaaacaacaataacaagaagtcccagtctgactgctccccaggccaggcttggtgactttccaccagccacaacggcctcccttctgtgccaagaacagtctggctccttcccacctcagggcctctgcacctgccaatccccctgcctagaccactcttccctcaaacatatccatagctgggtaaaagtttgccttctgtgcttcaggtgcccactcagatgtcacttcagaccataagtaacctacctcgccccctacctggtgccactctctatctccctacccgactttacttttcttcatgattactgcctggtgttacacagttacatcttttttgtttgtatttgtctagcatctgtctctcccgccagacttttaagctccacaagagcaaggacagtatcgtctgagttgttccctactgtgtccccaaggccaagaacagtgtctggtccttcccagctctgctgatttcctgctgtgtgatcctggagcaaatggtttcatttcaccccttgtgcctcagttttcgaacctatgaaatggggacaataacaacgtctatctcataaagttgttgagaacattcaaatccataccaagaatgagaaataacataccaagtgcctggaatactgcctggcaccgagcaaacactacataaatgtcagctgcgaatatcattaacacagcaggcctctactgcattcccaatggatgtacagacagacgcagaacaggcgcccagcaaccgtttgcagaagttactactcaagagttattaagcagtaactctggctctgtcctcccttaccaagtggccctgttgagccccttctctgctgcttgcctgggtgtcccatctgtcacaagaggatcatcatggctaacattttcggattctcaccatgtgccaggtgcttggtgtatgagtttcctgttactgttgtacaaattagcacaaactttgtggctaaaaacacaaatttggccaggcgcagtggctcacgcctgtaatcccagaactttgggagactgaggcaggcggatcacctgaggtagggagttcgagaccagcctgaccaaaatgcagaaactccgtctctactaaaaatacaaaattagccaggcgtggtggcgcatgcctgtaatcccagctactcaggaggctgaggcaggagaattgcttaaaccgggggggcggaggttgcagtgagccgagatcacaccactgcactccagcctgggcaagaagagcgaaactccgtctcaaaaaaacaaaaaaaaaacacacaaatttaatatcttacagatctggaggtcaaaagtctgaaactcggccttacagggctaaaatctagatgcggcagggctgcattccttccttccgggagcactagaggagaacgtgtctccttgcatcttcggcttctcgaggccacctgccttccttggctcacagtcccttcctcgtcttcaaagctgctgaaagcgctggcatcactccaggctctgcttgcatcttcacagctctggttccagctctcttgcctccctctttcccttataaggcctctgggggttacgtgaggcccaccagataatccagggcactctccccatctcaagatccttaatttaatcaaacccacagagctcctttggccattaaaatatttccaggttctggggatgaggacatgaacatcttttgagcaccactgttctgtccaccacacttggctaagcatgggccgggcatcactgaagcctcaaaaccactttaaatagaagggtctgttacgactccagtttcacagatggggaaactgaggctcagacaggtttaatcaatagcttacatggcacacaagctaataactagcagagtacttcggacgcaactgcctgactgcaaagcactgtccaataccaccactgttctcaactcctttctttccatccctgagtcaaactcaacatctttacctctcccacaatattcagcatagctcctaaatgtggtaggatggagatgcttgtattttaaatgaacaattcctactgcatatataactatttctactttaaacaggcactccctgacatttcttctttgtatataaaaaaagtcctggctaggagcactggctcacgcctgtaatcccagcaccgtgggaggtggaggcgggagaatcacttgaggccaggagttcgagaccagcctggccaacatagcaaaaccctgtctctaccaaaaataaaaaaagttagctgggtgtggtgacacgcacctcaataatcccagctactcaggaggctaaggcacaagaattacttgaacctgggaggtggaggttgcagtgagttgagacgagccactacaccccagcctgggtgataaagtgagactctgtctcaagagagaaaacaacaggctgggcacagtggctcacacctgtaatctcagcactttgggaggccaaggcaggcagatcacttgaggccaggagttcaagaccagcatgaccaatatggtgaaaccctgtctctactaaaaatataaaaattagccagacttggtggcgtgcacctgtaatcccagctacacaggaggctgaggccagagaatcacttgaacctgggaggcagaagttgcagcgaaccgaaatcatgccactgcactccagcctgggtgacagagtgagactccatctaaaaaaaaaaaaaagtggccaggcacggtggctcaggcctgtaatcctagcacttcgggaggcagaggttggcagatcacaaggtcaggagagttcaagaccaggctggccaagagggtgaaaccccgtctctagtaaaaatacaaaaattaaccaggcatggtggcaggcgcctgtaatcccagctactcgggaggctgaggcagagaattgcttgaacccaggaggcggaggt[131 bp omitted]tggggtggtggctcacgcctgtaatcccaacactttgggaggccaaggcaggtggatttcttgagcccaggagttcaagaccaacctgggcaacacggcgaaaccccgtctctactaaaaacagaaaaattagttgggcatggtggcatgcgcctgtagtcccagctactcaggagactgaggcacgagaatcacttgaacctgggaagcagaggttgcagtgagccgagattgcaccactgcattccagcctgggcaacagagcaagactcaatctcaaaaaaaaaaaaaaaaaaaggtttatatatacatggtaacaacccaataaatgtccatcagttgatgaatagataaacattgtacagtatatttatggaatatcatccagttatttaaaaaactgaagttgtgatatatgctacaacatggatgaacctcagaaacattatgcaaagtgtaacaaggttaagtgtaaaagaccacgtatacatttataagtccagaatacgcaaatccagagaagcagaaagtagatcagtggttgccaagggcaacattggggagagaataagaagtgactgtttaatggttatgtggtttctttttggagtgatgaaaatattctgaattagagaatggagatggttgaagaacattgtcaatatgctaaaaaaaaaaaaaaaaccctgaaatgtgcactttatttatttatttatttatgttttttgttgagacggagtctcactctgttgcccaggctggagtgcagtggtgcaatctcagctcactgcaaactctgccttccagttcaagtgattctcttgcctcagcctcccgaatagctgggactacaggcacgcaccaccacccccggctaatttttgtattttcagtagagatggggtttcaccatgttggccagcctagtctcgaatccctgacctcaagcaatccacccgccttggcctcccaaagtgctgggattacaggtgtgagctaccgcatctggctgaaatgtgcactttaaatggttaaaacagtaaattttatgtgaatttttctcaaaataagagatgagtgctcagtatgtatcagctgtgaggataagagcacaagatgactatcaccgatggcctgggttcgtgtgcatgcagctttctcagggagacacagttctgatatgaactgttcctgaaacaaacatggcacaggaaggcaaagttcctgagatatattgctaaaaaactgtttcacatccatgaaatgcaatcttttcttttttttttttttttgagacagagtcttgctctgtcacccaggctagagtacagtggcacgatctcggctctctgcaacctccgcctcccgggttcaaacaattctcctgcctcagcctcccaggtagctgggattacaggtgcccaccactgcacctggctaatttttatatttttagtagagacagggttccacca[139 bp omitted]ctgcgcacggcgtggctgacgcctgtaatcccaacactttgggaggccaaggcaggaggatcacttgaggtcaggaattcaagaccagcctggctaacatggggaaaccccatctctaccaaaaatacaaaaattagccaagcctggtggcatgtgcccgtaatcccagctactagggagattgaggcaggagaatcacttgaagctgggagggggaggttgcagtgagccacgatcgcactactacactccagcctgagtgacagagcgagattctgtctcaaagtaagtaagtaagtaagtaagtaaataaataaataaataaataaggtagaacttcatgcagtgtgcatctccaaaatacactgttacttgaaaaaaaacacacaagggaacagtgtatatactatgaattttttaaaaagggatggaggcggtaggtatatatgcttgtatgtgtacagaatgacccaggaagaccacccaaaaaaactgctaatggtggttgcatcaggagagaagaatgagggagcaggagttggggagggagcaggagttggggagggagcagggagggatggaaagggtgaggggagattttctttttagtgtatacccttttgcaccttttgaattttgcactatatgcatataatacccattcagaaagcaaatataataaaaccccaatggccaggtctttgtggctctgtctgtaatccctgtaatcccagctactcaggaagctgcctccaaaaagcttaaaaaaaaaaaaaaaaattagttgggtgtggtggtgtgcacctatagtcctagctactcaggaggccaagttgggggatcacctgagatcaacagttcaagaccagccttggcaacatagtgagactccgtttaaaaaagaaaatcaaatataaataaataaaaccataatagttatctcaatacaacagaatactatacagaaatgacaataggccaggtgcagtggctcatgtctgtaatcccaaggatttaagaagctgaggcaggaggaatgcttgagtccaggagttcaagaccagcctagacaacacagtgagacccccatctctgcaaaaaaaatacaaaaattagactggtgaactggcacatgcctgtagtcccaactactgaggaggctgaggtgggaggatcgcttgagcccgggaggtcgagcctgtagtgagctgagatggtgccactgcactccagcctgggcaacatagtgagaccctgtctcaaaaaaaaaaaaaaaagacaataggagtcgagcacagtggctcatgcctgtaatcccagcactttgggaggccaaggcaggtggatcactagaggtcaggagttcgagaccagcctgaccaacatggtgaaaacctgtctctactaaatacaaaaaattagccaggcgtggtggtgcatgcctgtaatcccagctacttgggaggctgaggcaagagaaccacttgaacctgggaggcggaggttgcagtgagctgagattgtgccattgcactccagccagaacaacaagacgaaactccgtctcagaaaaaaaaaaaatcacaataaatcatctacagctacactgaacgacatagatgaaatgaacaaacataacaagggaagccagataagaaaagtttataccacacgattccattttatatgcaattcaaaatcaggcaaaatgaatctatgctgttaacaatcaggacagtggttacccttgcaggggtactgacagaaagaacctgagggaactgctgggggctaggcatgttctgtgctgcatctgggtgtggagtacacagggctgcagtttgcaaagagtcactgagctgtactcttacttacaccttcacttcactctatgtatgttacacatcaaaaaacagtaaaaacaaatttaagacaccacagtggcgaactgagtgattagaaaaccaataacaatcaaaaatgaccataggccctattgctgatgaacatttcttctaaaaatgacacacctccagtgacacaccagagttatatctgggtcttgtccaagccacccctccagcccaggagtagttagcaaagaggttggcatttccctctgggagcaggtgatgaacagacaacagagcctgctgtggctactgcaaacaaccaggtgtgtggggctgtcataagcagatggctaagccccatgtggtaagatcgagattttgcataacaataattagaggagaaaatgcagggtagtagaagaacccacagatgtggccaggtgcagtggctcatgcctgtaatgccagcactttgggaggccaagacaggaggactgcttgagctcaggagtccgagaccaggctgggcaacatagtgagaccccatctctacgaaaaatttttaaaattagctgggcctggcggcacacgcctgtagtcccagctatctgggaggctgaggtgggaggattgcctgagcccaggaggttgaggctacagtgagccatgactttgcaactgcactccaacctgggcaagagagtgagaccctgtctcaaaacataacataacaacccagagataagcctactgccttggtggccagaaatgtctgcctttatcagttacgtcaaaagaatcaaaattagcatttgatgaatccagagtaaccccacaaattagtcattgccagatgcaatcagtcattccaaagggtctctgacgtggagtaagttaacaaaacaactgctgcaatgctgatctcccactcctgtgtgtggcccctgcagttgattgtcaacatggagccagcaggatcctgtgaaggcctaaggcagatcctgtccctcctctgctcggagccctccggtggctcctatctcacacctggagtaaaagctcaagtcctttcaatggctttccaggccttaagtggttttttaggggttcccagtcccaccctgttacctcatctcctacctctctccccctggctgactccaccccagccatactggcctccttgctgtcacaagccagcttcagagtcttttccctagatacatacatagctcatgttgctcaaatgtccccttttcagggaggccttcccggaccctactatttaaataaaaatccttgccactgctccagctccagctggggcactctcattccccttcattaagttcctccatagcactcatcatccaacatatgtttcactgactcatttgtcagtctttccctactaacgtgaaagctccacaagactgaatttcttttgtttttaagagacagcatctcattctgttgcccaggctggagcgcaatggtgcgatcatagctcactacagccttgatcttccaggctcaagtgatcctcccgcctcagcctctggagtagctgggaccacaggcataggccaccacgcttggcagatttttgtatttttagtagagatgaagtttccctgtgttgcccaagctggtctcgaactgccaggccttggcctcccaaagtgctgggattataggcgtgagcttactgcaccccactgagagtgaatattttttgtcttctgctgtgtactgctgtattaaaacagtgcttggcctacagaaggcacttaataaatacttgactaaataaatgagtgaatgaacaaataaatccatcatctactcccgagtctataggttctttctctgcactgacaacttccccacattctgtcttcagctccacatgtgatccccaactgcctcctggatgccacccctagaatgtcccaaagtcacatcaaacctggacatcccaactgaaacacatcacctccccaagctgctccctctggggtttaccatgttggtgaccgctgcaatactccctcagtctctcccaggccagagacaggttctgtctcttctgcctccagtcactctgtttccacagcaactggggtaacagaatgaaatgtgatttccctggagtcacttgatcataagagagcccagtggaatcatcacccactaagtaataaaaacacaaatccctccctctacacaaacacctacatgttgacagagcacttgtgcagacattatgtcaccgaattttcacaactccgggcttggatgtcattattcccaatggacacatgagaaaacaggttagagaaatgaaacaattttcttgaggtcaccgattaagaggaagagctgggggcttgaatctagatctcaagactaaaactgtcagcaatctgtatctatcacagtttaaaagactgaggtcaggtgcagtggctcatgcctgtaatcccaacattttgggaggccaaggtgggtggatcacttaaattagcatttggtgctcatttgccttgaactcctgaggtcaggagttcaagaccagcctagccaacatggcaaaactcggtctctattataaatacaaaaattagccaggcatgtaaattccaactactcagaaggctgaggcatgagaatcatttgaacctgggaagtggaggccattagttgacaggcactaaacactgacatcaattggggtggaccagatgatgttacagtaacaaaggagtccctaatctcagtggtttaaaacaaccaagttgtattaacttacactgtaataatgctgtgtaacaaatcatcctaaaactgagatcttttctttttttttttttttttttttttgagatacagtctcactctgtctcacaggccggagtgcagtgaaaccatcacagttcactgcagcttcaaccttatgggctcaatcaatcctccccgctcagcctccctggtagctgggactacaggcatacgccaccaagcccagctattttttataatttttcgtagagatagggtttccccatgttacccaggctggtctcaaactcctgggttcaagcgattcacccacctcgacctcccaacatgaaaactgagacttataccaacaagcattcttataagaatttgtgggatggctgctttggctgcagtttgggaggattcaggtctcttccatgagattccacagttttctgggattagcagtaacctggcaaatgttctcatggcatattatgggagcacaaaagccaagtgcatttaaggcccttgctgaagttagatgtgctgaaattccattaagtaaatcatatggtcaaactcatcaatggagcagggaaatatactccccctccagtgggagggagaggagtggatatttgctgaatgactgcccattcacaaaaggttaatttttccgtcaccctagcactatccacagagtgttctgctccttatagtcataaagcagcccccaggccaggaacaatggttcatgcctgtcatccgagcactttgggaggctgaagcaggaggaacgcttgagcccaggagtttgagaccagcctggcaacatggtggaaaccccatctctaaaaaaatacaaaaaaaactagccaggcatggtggtgcacacctgcagtcccagctactcaggaggctgaggtgggaggatcgcttgagcccaggaggtagaggctgcagtgagccaagccaagatcatgccactgcactacagcctgggaacagagtgagactctgtctcaacagataaataaaagattgactgtcaggcaaattgtataacttctttgggcctcagtttcctcatctgtaaaagtggggataacagagcctgcctcttggggttttttatgaggactcaatgagctaatccatgtgagtgaggtgtgtagagcagcgactgacaggtaacgttgaataatgccagctctcattattattattttattttttatattttgggggtctcactctggtgcccaggctggagtgcagtggcacaatctcagctcactgcagcctccatctcctgggctcaagcaattctctcacctcagactcgccagtagctgggattgcaggtgcacaccaccatactcagctaatctataaaattttggtagagatgacatcttactgtattgcccaggctggtctcaaactcctgggctcatgcaatactccagcttcggcctcccaaagtgatgggattacaggtgtgaaccaccatacctggctattattctttaaaaaaaattatttattttaataaaaatagagacagggtcttgatatgttgcccaggctggtctggaactcctgagctcaagcaatcctcccatctcaggctctgaaagtgctgggtttacaggcatgagccacggcatccggccagtttccccttctttaaagtggagttgattggcttagacgaccttcctggacaccttccagccctgagcccactggctgcaggaggcagagtacgtggcaatgattcattttgttccagctgaggaaactggaacccagaaagtagatgccacctgcccaggaccacacactgattcctgtggtcatcctggacttaatccttgggtctcctttcctctctgctgaggggcacagggattatgctgcccattttccgagtaaggaagctgaggcccagcaaagaaagtgactaaacccactgccagttggctcaggagcagaatctggaaccccggactccagactcctagtgaggaggaggtggggtggcaggatcacctgtaggaccacagagatggtcttctcgcctgccttggctgcccgccattttcggtaagtgtctgccttgagaagattttctgcacagtgagtctggaaacaacagtgggagaggagaattagggcacagagatgacagctaggcctccagctctcagatgattcctttgagtcctcccaaggcctctacgacccccagatttaagctctcccgttaatcccccgacactctgcctggagtttcccctacaacactttcccgtggaagttcacctatgggctctccaagaaagcttccctattcctccttttctctccggaagttccctagacgccggaacgtccctaattcaacatctctccacaattcacttttagcctcctggaaatccccccatgactctccttagacttccaagagaaccccaaaagctcttttaagagctatcctcattaattccctcacgtcttccaacctcccccatgcaggtccctcaccgagtcctggctgctgcaggacacgacatggcggaggcggatctccggcatgtcaacgtcgtgggcttcgcctggccagaaggatgaggtagagtatggggtccgaggggcagggagagtgggagggggcggggtgcgccctgcgctggctaaagtgcgcaagcgcgcgaggctcgggcctttcaaaccccggcgcgccggcgccggcgtcgacactgcgcaagcccagtcgcgcctctccagagcgggaagagcgctgcgttccttagcaacgagcgtttcctccagccccgcctccctccgccacacacaaccccgctctagcctcgcctcccaatgacgtccgaaccctgctttctgggagcctagcaacagaagcgacctccgggattggtgtctggaagaaattcgcctttctcattgcacgatggagttaccgcccacactgaagccgagaaagcaaatctttttgctgtattattatttattttattttttaaaaattttttgttgagacagggtcttgctctctcacccaggatggagtgcagtggcacgatctcggctttctgcaacccctgtctcctggggccaagggatcctcccacttcagcctcctaagtagctgggattacacgcacgcgccaccacattcggctaatttttgtattttttgtggagacatggggtgagagggcggcgggtcttgccatgttgcccagactggtctcgaactcctcagctcaagcgatccacctgcctcggcctctcaaagtgctggaactacaggcgtgagcgactgcgctgggctaggacagcaaatctgagtgaattttcgtagtttcgtagggaacctggattctacgcaacaggatctcttcaaatggctcaggcggctgcactcttctctctgtccccttgccacacacacacacacgcacatatacatacatacgcgcgcgcgcacgcgcgaaaaaaattagcagatctctttcagccttatgcctgaggccaaaagagaagggttctgcgtcctaaatataacacaaagcatgtgcccaacccccaccacacacacacacacacacccctatcctggagttcttccacaaaagcctcagtttcccaatatgtggactgtgggcatctgtcttttactacgcccgcctatgactgccgacagacatccctctgttcattcggtgccttggagacccaagggtgcagccctgggtggggtcgcagctggagacagcccaaacacacaaggagtgtgagccgagcacatgaagagaggggaagggagacaaggcaccccgcacccgcaggaccagcctggacatgctgggtgctccaaggtggggccctacccacactgggtgcttccttgggaggagaggggaagagagagaaggagagggaatcccagttcttgcagccactgggaatcaagaggcccaactccgtcttggtcttcaagcaaacaaacaaacaacaatgggccgtgggaaggtgagaaaacagggtggtgactttctgggttctaatagaagagggggatggaagcccagactcctggggtctccatggaggtggggggctgggcacaagatgcccaggtcacttttggattctggttctgccttcccaacccggaggccacagaggactgccctgggttctgacctcagctatttctccccgtagggtgaatgtgggtccagacccacccctcctcagcttcctataaaagctggggaccaggtactgctgatacacacaccatgaggctctccaggagaccagagacctttctgctggcctttgtgttgctctgcaccctcctgggtcttggtaagtgacaagggacctgaactgtctctgggacctcaggaagagagaggtcccagattgagagagagagagatatagagagagaaagagccttcagcaagtcctcaaggtgaacggggaggcattctggaaattcagattcatggaagaggccaagggtaaaggaagagaaagcctgggggtcccagagaagaaaagctcctgtgattggatccctgagagaggggcttggtgggctctgaatcctccatcctccaggaaggatcccaaacacatctcaattctaggaaatcagatgagagcatggctggaaagggaaatctttaaaaatataattaaaaaaaaaaaaagagggagaaggccaggtgcggtggctcatgcctgtaaccccagcactttaagaggccgaggcaggtggatcacttgaggtcaggagttcaagaccagcctggccaacatggtgaaaccccgtctttactaaaaatacaaaaaaagttagctgagcttggtggtgggcgcctgtaatcctagctacttgggaggctgaggtgagaggattgcttgaaactgggaggcaaaggttgcagtgagccaagatcgtgccactgcactccccagcctgggtgacagagcaaaactccatctcaaaaaaaatacattaatatcatatgatatatttttttaaaagaggtagagagatttcctttctccttagactaagaagttcaggccccagccccctcctcccctgcacacaggagtccaagtaagcctcactttccccaggacccaggtttctgggcccctagctgtcccctctctcagaaccaagaagttcaagtcctctgccctcctggtcctcactctccctccttgacctgggatgcagaccctagcctcagggccccctgcctgagctcctgctgtctacaagacctacatggcaccttcaaggaggagaatcccacattcaagaaccagctggacctgaagtttcacaaaagtccatggaaacctccatcacgacccctccctgcccctgagctttctcagcggaccctggcatccaaaatccccagccatgtaattaggcaaacaggcttcatggtggagtcgcttcccgcccctggaagcagctttgctggcatcaccactgcttcttcgtccaactctggacagttccttgggcagtggtcaacatcccgcccatgaaaaaccagggagctgctggtccctcctctctcaggacacaaaagtcctaagtcaaagtcgtggtccgaagaccacaccacccatgactacagcctcgccctctgtctacactgcagggtgcccactacactgcgaaatatgtacggcggcggggagcaggtgccatggccaaatgaagacctgcagcagtgacaaggacacatgtgtgctcctggtcgggaaggctacttcaagtaagaggatgtggcctgggacctggtggggaggtggggtgtaccttcagggtggaagagactaccatgctgaggggggatcatcatggttctcaagacgggagcgtgggaagaaatcagtggagagcaggaaagagggaaagaccatcatgagatggagggaacagaaataagtggtgtgatagaaatcattattgtcacagaattctgaaaatgacactgtcctaaagagaaggaaaatgtgggaggggtgagagttaatagactttcttaggcagaagaggggtaaggaaagacactgtggggggcagagaaatagtgagaggggaagaatctaactggcaggaggtggaaatggtggggagtggatagagaaggaagaggctgggctggggtgggaaagtgtaagtgtaatcagggaagaggtcattcctgaccgagggaggagagatgatggtggagtgttggagtggtggaagagacagaaaagggatcaccccaaacaggagatggatgataaccttgaagtatggagcaaatcattttttttcttttttgagacagagtctcgctctgtcacccaggatggagtgcaatggcgcgatctctgctcactgcaacctccacttcccaggttcaagcgattctcctgcctcagcctcccgagtagctggaattacaggtgcgtgccaccacacctggctaatttttgtattttttagtagagacggggtttcgccatgttggccaggctggtctctaactcctgacctcaagtgattctcccgcctcgacctcccaaagtgctgggattacaggcatgagctaccgtgcctggctgagcaaatcatcgtaaagaggagaagcagagacagggagggggagatgtggatgagtaaaatgaaagggaggccgggcacggtggttcacgcctgtaatcccagcactttgggaggttgaggtgggaggatcgtttgagcccaggagtttgagaccagcctggacaacaaaaagagatccatctctacagaaaaaaaaaaaaaaaaatagttgcgcatggtggcacatgcctgtagtcccagccacttgggaggctgaggcaggaggatcacttgagcttaggagatcgaggctgcagcgagctaagtgcacaccgctgcactccagcctgggcaacagagggaaacctgtctcagaaaataaaatggaagagagaagatgggcatgagttaaatgaaagagaccaccccagacctgaaaaatgatggaggagaaagggagcaatggaagagaccagtgggggacagagatgtttatacaaagctgaaagagactttcaatcacaggaggagagatgatgaggcctggtgagggaataaaggcgactttgggtgcagggagaaaacactggtcgggagaggctgtgaaaggaaagtgagatcgaaaatcacccagccagcgttggtgggttaaggaaggacctgaaaggcttgaagagaacccccatcccggcatagaagaggaaacgcaccctcgggaagggaggagagagagctgggggacccctcgatggagtgaagggggaacctgtgaattgggtaggaagagaccaccacatggtggggagggggaaggccggggagactggaagaacccaccttaaacaagacctgaaaatagccaagaggggcagcaagagaccctcgttgggaggtctgaggagtgaccatggcaggatctgagagaggaggatgcctgttgctgggaccggggttcattggaagagactacggggtgggcgggggttggcggggagttgaggaggctggaagagaccatttcacgaaggcatgggggtggccataggcggcctgaaatagagtaatcccggaaggacagggagagaggggtggccgtgggtggggtggggtggggtggaagggaccacatccagcaggctgaggttggcaatggggagctggaagagaccaccaaaggccgactaggggctatggcagcgggagggagggctacctaagaaagcactccaggccatgcaccagacagatttggccgcatggc[137 bp omitted]accccgtctctattaaaaatacaaaaaaatagccgggcatggtggcggtcgcctgtgatcgcagctactcgggaggtggaggttgcagtgagccaagatcgcgccattgcactccagcctgggcaactccgtctaaaaaaaataagaaaagaaagaaaaaaaagaaagagaccatcccaggaagttgtggggttggggaggcctagggttaggcaagaccttgaggcaggggttgaagccagggagtggtcagccagcactgtccctgcctgtccccatcccacagagggcaaggagttggtgcacacctacaagggctgcatcaggtcccaggactgctactccggcgttatatccaccaccatgggccccaaggaccacatggtaaccagctccttctgctgccagagcgacggctgcaacagtgcctttttgtctggtaagaagcccgtggtgtgtggtgtgtgctctggctctccactgacccttgctgtagccacttgctggctctgagcctgtttccttacctgtaaaatgcagtgtctattagcaaccctggtgtttcccggggttgttgggaggttgggggaacggcttaaacatccctattcaccttacacttcatcctcatcctcagttcccttgaccaatcttactgagaatggcctgatgtgccccgcctgcactgcgagcttcagggacaaatgcatggggcccatgacccactgtactggaaaggaaaaccactgcgtctccttatctggacacgtgcaggctggtgagtggtgcctgaatctctggaaaaggaaacagaactagaggtccaaacttctaggttcgatgggaggagagggttccagagaagtgggtgaggatgtgttctgggattatgaggaagaaggggctgaggtccctgattccagtctgaaatctccctttcaggtattttcaaacccagatttgctatgcggggctgtgctacagagagtatgtgctttaccaagcctggtgctgaagtacccacaggcaccaatgtcctcttcctccatcatatagagtgcactcactccccctgaaaagctatctgaacagaggaagataatgtagtgtgaagtccccatttgtcctcagcctgtaactccccgtgtgcctataaagaagttaatagagcaagcctgagtccttgtggtgtgatgtatcttgatgagatagaatgcaggaaatagggggtctcaatcctcatttcaaatcccctccttttgaggaagagagggaaggccctgccttctttctttctttctttttcagacagggtctcactctgccacccaggctgaagtgcagtggtgcattcaaggctcactgcagcctcgacctcccgggctcaggtgattctctcacgtcagcctccctagtagctggcactacaggcatgcaccaccatgctcggtgattctcccacctcggcctccctagtagctgggactacaagcgtgcaccaccatgactggctaattttttaatttttttgtagcaacagggtttcaccacattgcccaggctggtcttgaactcctgggctcaagcgatccttggcctcccaaagtgctgggatgacaggtgtgagctaccatgcctggtggccctgccttttatgaagggattagtctttgccaggtccctgtgctgtgttttccatgctatacctcatttcatgatcataacaactgtgaggttgatattattatccccactctacagatgaacaaactgaggcatagattgtgggtgtcaaaatttgccttgggtcaaacaaccagggagggtcagaaccttgatttgaacccgagtctggtatacttcagagtccatgatcatctctctcaattaactgcttcctctttttgcctcagtgttcatgtctgcaaaatgtagatattaatagttataacctcataaggttgttgtaagagtcaaatgaaagacaacttaaaaagcgcttagtgcaatgcctagcaccacatgtggattctaaagacaatgtatgcctgagtaaacagtaatcatcataatagctgccacttactgagtggccattagttgacaggtgctaaacactgacatcaattgggacagactagatgttacagtaacaaaacaagtccctgatctcagtggtttaaaacaacaaagttgtattaa[132 bp omitted]gcctcaacctcatgggctgaatcgatcctccccgctcagcctccctggtagctgggactacaggcatgcgccaccatgcccagctatttcctgtaatttttttgtagagacagggtttccccatgttacccaggctggtctcaaactcctgggttcaagtgatccacccacctcggcctcccaacatgaaaactgagacttataccaacaagcattcttctaagggtttgtgggatggctgctttggctccagttcgggaggattcaggtctcttccatgagattccacaattttctgggatcagcagctccctcgcaaatgttctcatggcacatcacgggagcacaaaagccaagtgcacttaagggccttgctaaggttaggtctgctaaaattccattaagtaaatcatatggtgaaacccatcagtggagcagggaaatatactccccctccagtagaagggagaggagtggatatttgctgaatgactgcccattcacaaaaggtaaacttttccttcaccctagcactatccagagggtgttttcctcgtcatagtcataaatcagccaccggcagggcacgatggctcacgcctgtcattccagcactttgggaagccgaggcaggaggaccacttgagcccaggaatttgagaccagtctgggcaacatggcaaaaccctgtctctacaaaaatacaaaaaaaaaaaaaaaaaaaaaaattagccaggcgtggtggtgcacgcctgtagtcccagccacctgggaggctgaggcgggaggattgcttgagtccgggaggcggaggccacagtgagccgagatcttgccactgcactccagcctgggtgacagagtgagaccctgtcttaaataaataaataaataaagcatccaccaacttgaatgtggccaatttctgtgtcacaggaagtctaccatgggtaatcacatgctgtgacataatacaagtcactggatggagctagtcacatggcccacccagccacatgggcaccaggaagtgagatcctgccccaaggtcagaaggcagagaactggacatgtttcattaatagcacaaatgaccaccatgaccccttaagaagctgtttttcattttattttcacaactctatgtcataggcactattattcacatctctgttttcaggagacatcagaggctcagaaggctgtcacattggcagtcacacagctaaaaagtggcagaatttaagattttaatcattgggtcatgttgttggggagaaagagaccacatcacacacagagagaacaagtctgtattagttgcttttgctacataacaaaccactccaaaatttagtggtttagaacaatcacctatttagttaatgattctctgggttgcaacttggtctgggatcagctgggcagttcttttgctggtctcagctgggttcagctgcctatcagctagggagctctgtttcagaggttggttggctatgggtggcagggatcaaggatgacggagccatgtgtctcttttccctttattacccagcaggttagcccagatcttttccttttctttccttctttttatttttttagacattgtcttgctctgtcacccaggctggagtgcagtggagccatcatagctcacttcagcctcgacttcctgggctcaaacaatccacttgcctcagcctcccccatgtagttgggaccacaggtgcacaccaccacatctggctaattctgttgttgttgcttttttgtagagatgggggtcttgccatgttgctcaggctagtctcgatctcctgggctcatgaaattcttccacctttgcctccctaagtgctgggattatgggtttatacccatatgccaccatgctcagccagcccggggtttggatgtggcagtggtggtaggggtcccaaggggagcaagagaggaagtcccagtgcataagcactttggttttttttttttgagagaagtctcgctctgttgcccaggctggagtgcagcggcgcagtctcagctcactacaacctccgcctcccaggttcaagctattctcctgcctcagcctcccgagtagctgggactacaggtgtgcaccaccacacccagctaattttttgtatttttagtagagagacggggtttcactgtgttagccaggatggtctcgatctcctgaccttgtgatctgcccgccctggcctcccaaagtgctgggattataggtgtgagccaccacacccggccgcataagcactttccaagcctctgcttgtatcatgtttgctattgttctagtggctgaagcaaaccacatagtcaaacctagaaggagagcaacaatccaagggcatggctacagaaaggctggcccagttggggtcattaatgggtatacctggctccagaactaaggcgctttaccatcataagctcccaatgtttaaacagtaagtctgcccgcactccttccagggtggaaaaactcagatactgataaattctcttgatcacagcccagtttttcccagcggattccccaccatccctcctatccccagacgctggagtctaggtttccagcccagtcaaaatctcaaggatctttcttttccctcaaactccaaaagaacagacacgcaataggatttctattcatttttattcattcctccaaagagcaccacaggccaaccacacccttgatgtgtccttcatggttccccactgcagtggacacaaatccctccatcattatccaggcatggatggaactctgctgtggtgaggaggttgtctcgcccactcacccaagttttccatgcctgttctgcttttgatggcaatgccaaaattcatcatacatttccttgaattcctgccttcaagggtcttccagccctgtggtgccatgcagacacacttcagtggcggccagtgatctgtctacaagggagtcttagtcttttctgcttggatgctcccagggacagatgcctgccaacaaccttatgtcttcacaaagactaaaatggaatcccattaaaagttatgatttaaaaggcgaccacccccaaaagaagtcataacactcaagggtgtcaatatatacaactgtgtaaacacaaccaatctacaactatatcaacacaaccagcactcctctatgggcacagacacacacacaaaattgtcttgctttctcagatatgatctctggcatgactcctgctggcatgagggcagaggaaattgagaggagcaaagcatatagcagtgatgtcagacaggaccaaatcagagacagggtcaaagtggcagaaaaatgaggagcacactccgagcaaaggcatgggggtgagacaaaggcacccagactagagccatcttggtgctgcccaggggtgggtggcactcatgtttgagctccatgtgtcaggcttttcaggaaagggtgtactatgttatgtgtctgtgtgcatattgtgtgcctgcatgtacatacatacgctgaattctcaccataaccatgtgaggtagatgccatttgtagagtgacttgcccaagtcagtggaaggactatctgcccctagagctagactgatagaattttctatgttgatggaagtattctgtaccttccctgtccaataccatagccactaatcacatgtggctactcagtattaatgttgcactactgccaatgaaacatagaattttaagttgtatttacttttaattgaacagctgaggccaggtgtggtggcccatgcctgtaataccagcactttgggaggccgaggtgggcggatcacctgaggtcagcagttcaagaccagcatgcccaacatggtgaaaccccgtctctgagaaaaataccaaaattagccaggcatggtggcatacacctgtagtcccagctactcaggaggatgatgcaagagaatcagttgaacctgggaggcagaggttgcagtgagctgaggtcatgccactgcactccagcctgggtgacaaagtgagactctgtctcaaaacaaaacaaaacaacccagcaacttggtcaacataaccagacctgcatctttacttaaaaaaaaaatggacacccatctcagtttttggaaaactattatataattggaacaacttggatatgtgaatctacttctccaactatgaattttatgaaatcaaaataaaggtcaagcatttcagataaaaatgtaccatggtaattgagatttggtgtaagtgtaaaatatataacagattttgaagacagcacaaaagaacgtaacataattcatttaaataataccgatgacgccaggcacggtgcctcacgcctgtaatcctagcactttgggaggccgaggtgggtggatcacctgaggtcaggagtttgagactagcctggccaacatggcgaaaccccatctctaaccaaaaatacaaaaattagtgggcatggtggcgggtgcctgtaatcccagctactcgggaggctgaggcaggagaatcacttgaacctggaaggtggaggttgcagtgagccgagattgtgccactgcactccagcctgggcaacaaagcgaagcactatctcaaaaaaaaaaaaaactaaaaaaccgatgacatgttgaaatgctattttggatacattgggttaagtaaaacatgttaaaatgaatttaacctgtttccttttacttgtctaatgtggctattagaaaacttggcttactcagcactttgggaggctgaggtgggcagataacttgaggccatgagttccagaccagcttagccaacatggtgaaaccccatctctactaaaaatacaaaaattaggacgggtgcagtggctcacgcctataatcccagcactttgggaggctgaggccggtggatcacctgaggtcaggagttcaagaccagcctggccaacacagtgaaaccccatctctactaaaaatacaaaaattagctgggcatgatggtgcatgcctgtaatcccagctacttgggaggctgaggttgcagtgagccaagatcgcacaactgcactccagcctgggtgacagagcaagactccgtctcccaaaaaataaataaataaataaaataaaaatacaaaaattagctgggcgcggtggctcatgcctgtaatcccagcactttgggaggccaaggcgggtggcctgaggtcagtagttccagaccagcctgatcaacatggtgaaaccccatctctactaaaaatacaaaaattagccaggcatggtggcatatgcctgtaatcccagctactcaggaggctgaggcaggagaatcacatgaacctgggaggcggaggttgcagtgaggcgagatcgtgccactgcactccagcctgggtgatggagtgaaactccatctcaaaaaaagaaaacttaaaatgacatatgtggcttgcatttcgtttctactggacagtgctgccctgcagccctcccattccatcacgtggctgacatgcctgattgcagggcttagacactaatatgatggggtaaagatatggatgaatattcttccccaaagctgaaagagctttcatgaaaatgcctggagccattcagtatagaactaagtgctcttccccatggtagctatctcaactttgaagggacaaattttgtcagcagtgggagtccaagctggagatgatggtaccatcccttgtctgcccttggatcagttacctttgtcttcagcttttaagggagacaggatctcaaaactaaggttcttatccagctcttttatttcacagatgggaaaataaggcactgtccaagtaacacacagtgacagtggcaaagtcgtgcttgcttcccaggtccctgacctcagacaagggtgttctctcccattaaatgcttttttctcctcatcttgctccattttcctatcttgtggcaagagattaacaatctaaattccaatcctagttctgacactgaccaatgaaataaacatttaggctgggtgtggtggctcacacctgtaatcccatcaaggcaggaggatcacttgaggccaggagttcaacactagtgtgggctacaaagcaagacccccgtctctacagaaaatttggtgctgtgtacctatagtcccagctactctgtaggcggaggtgggaggatcgtttgagcccaggagttggagatggcagtgagccatgatcatcccactgtattccagccggggcaacagagcaagaccctgtctctaaaataataataataataataaatatttacgaagcacctattgtgtcaggcacctattgttctagatgctggggaaacaacagagaacaggacaggcaacgggtcaaaagccaataaacaggtaaataaataagatcatttttgacagtaataattgctacaaggaaactcaactggccgaaatgaatagtgggggaatgtgagctacttcagatagggtggtcagggaggggaagtcctctctgaggggatacgtgagctgagatctgactgagcccgtcacaggaaggtttgagagtagaacaggaagttgtgagtagagccttgaaggaaagagaacagcaggtgcatgggtccccaggcaggactcaaggtagccactcaggcatcagaaagagtcaggcggccatgatggctcacacctgtaatcccagcactttgggagtctgagtcgggtggatcacctgaggtcaggagttcgagaccagcctgaccaacagggtgaaatcccttctctactaaactacaaaaattagccaggtgtggtggcacatgcctgtcatctcagctacagtcatcacatccctgtactccagactgggtgacaaggtgagactccatttcaaaaaaaaaaagaaggaaagtctatcaggctggacaggagtgggaaggggcagtgaatgagaataggcaagggccagacccacagggccttactgtgtgctgttgggcctcaagcctgccctctctggactttgctctttctgtctacgacaaaagggattctatcgcttggattctcagatcctccttttctgtttttgacactgaagaattctgtaacctgcaacttttcccccacatgtggctagcagcctagaacattccaggcactgtggtttctgcctttgcttcattcactcctggcatattcccatggtctcaagtgcctgaccacccatttggtgggcccctggctcaatgcagcaccctctatgtacatcagaaagcagagcctcttggggatacccgaggtgtccatacagaagtgtttggaccagtgcagcagtacagctgctcttctgaaaaggaaggtgcacaaaacaccaaggccataaagggttatggttaaataccaggagaaaaaggccaaaaaaagatagaaactcctaaagaaaagagacagagaaacagactccccagagatcacctgaattgctcagcacctagaagatgaaggcagtcatatcccttcccagtcacactcacagaggcagttgccgggatcccaatacaaggtttggaggagctgtctctgaggtatgctttactgcccttccacacccaaaagacctcattcctggtccctggctactcccagagcccaccatgcccagacctcttacccacctcacctcatttttgtgggaccaccctccctacatgcttttggagggcaattatagaaacccatccactccccaggagagatcaagaagtctccagctttctcgcacaagcccccgatccctcctccagatgcagacctccccttacccaatatttaggaaccaaggtccacagccatcttagaaccccggaagtctcagaccccaggggcctccgccaccccatcaagattcaaagcccactgctccttggggacctgtgtgcaggctttttctcccagagaaatgtagaccctgtttccctctgaggctctgaagcccaagagttccagctccctggggcgctcaggtctccctcccctatactggagttcaggtcccagtcatggacacctccccaccaattaggaaacaggacttctaccagcctccctggaggactaaacatccagtaactccagtttctactccctaggagacaaagacatagtccctgctagagtctgggccaccaactcccttcaggacagaagggtctagatgtcattcaccatggttcccaaaggtatcaggattcctggccaggggcggtggctcacgcctgtaatcctagcactttgggaggccg[134 bp omitted]gaggcaggagaatcgcttgaacccgggaggcggaggttgcagtgagccgaggtcgcgccattgcactccagcctgggcaacaagagacttcgtctcacaaaaaaaagaaaaaaaaaaaaaaaaatcaggattcctgtcccccagactctctgaatccaggtgataagaagtcacacatcccagctggaagtcaagagtccacatccccttcaagcacccaggattaagcccaggcatcccctgtcagagtctggactcccaagccccctcccactcctcactgggcaggctcagggggtgccagcacagcctcagcatcagcccgcatctcatcgagagcctgcagcaggacgccgtgagccgctcggtagcccaggccacctgtcgccgctgcaccacccgcaggccacaggaaggagagagcccccagtgctgcgcccccagcagtgccctcgcccgcccaggcgcccagtcttgcttccacctcggcgcgcgtcaccgggcctgggaaatgagcgcgcgctgccagctctccagaagccaggcccagggcacgctcacgtcgagccagtgccgtgggttccagccccaggccccgtcgccactccgccagctgaccccgcagaagtgccacgtcgcatgcccagcccagccctgggagtggtgccgccgccgccgccagactagccagcagagctggcctccacgccccggctcgcaacgccgcagccttggttcgggcagcgctgggagatgctggtggcaacgccagcagcagtgcccctgcctgggctggggggagcgctcgccgcagccattcgcatagccctgggagtccgccaggccgtagggggaacactggcggcggcgcctcctccagcacctcccacgtctcgtcctccgggcttaacgcagcggcccgctctgagtcgccaccacctgatttcttcatgccgacaacctgctgcaaaccctcgctgccagctttcccaggaccttccccgctgcctgctttctgcgatccagcgctacatttctcccttcccttactgagtgcattctccaatccccctccacctgcgttctttaagctctcgcccttgggattctccatcttgccttctcccagacactccggatcctcgccctcgccgtctgtgcgcacgcagacaagaggcgcatctggtagcagcaaggcctggacctgggcccagtccttctcagtgggggccccaggggtgacgaggatgagggcgtcgtagtgcgttgggtgagaggcggcggccgcggtggtggcagtgcccgtgtggcccagaggcacggtccagagcaccacattcgggcgctctggggctgggaagggagtgggtgctgtggggaccgaagcaggcgcagcgcctgggtcgccaggatccaatccaagcagcatgtccaccacaaggcccacgtcagccttgccagccacggccaggtctagccgtgcgctgcccaggcgctccaggcctgagcgcacccacgacagcgcagcctcaaggccgccggtctcaaaggcctcacgcacagcctctagctctgctgcacccaacacctcgaagccatcctgcgccggtggcaggagcctgtggggacaagaagggacagggtcaaaggtagaagaggggctgggtgacatggactgggctatgatgacaagggcagagctttcctaatgatcccagaatggggcaggggtaggaaagggaagggccagactgatggcacagcaaatagaaaccagatagggagaggcagtgatgatatgggtggggcttcaagcaataatggagtcttgattattggacgggtggacataaggtcaggtttcccaccccagcctaaaatggggattgggctaaaacttccatggaatacagtatttgggggcggggtttttccaagggtcggctgtgctgggtgggacaaagctcacagagggtggggcctagaacaaagaatcgcaactgtattgtggcctaaacacaagtccagcactatttgagacaaggtccccaagggcactcttttcaggggctgggcctaaggagggtcagtgaggggagaaatctcatctaccagttcttaccaagggggagtggctaaggtgactcccgggcaggtgaggctaaggaaaaaagatgacagtgtactgggacaagggactgtccctctctgagcctcgttttaaagtctttaaaatgaggaggctggcaggtggtagagcaaatccaggaggtagccagcaagtgggcacagaaacaagagggagctggagaaaggaggtagatgaggatgccccaaaataataaagctcattgcgggtgtggctttaggtgcttgaaaacaaaactgatggtggggagggctcaaagattagagttttcaggtaaaatcttccagggggctgggcagagagtctcacgactgtaatcccagcactttgggaggccaaggagggtggatcaccttggtgggggcagggcctggaaaaaggagcctcagggccccagcagataaagtgttaagcctttcccttttaattctagggctttgggaagcctgggtgggggcatggcttgaggccaagagttcaagaccagcctggggaaacagtgagatgctgttttgcagcctgtagtattagctactctggaggctgaggcaggaggatcatttgagcccaggaggtggaggccgtcagtgagctaggatcgcggcactgcactccagcctgggcgacagagtgagaacctgtctcaaaaaaaaaggccgggtgtggtggttcacgcctgtaatcctagcactttgggaggctgaggcgggagtattgcttaaggccaggagttcaaattcaacctagccaacatagcgagaccctgtctctcaggaaaaaaaaaaaaataataataatagagctaagccttgccccaaactcactgggggagggatctcatggacctccatggtcgcacctaggtgcctagggtctcgactaacggacccagccagaaagccggcactcacctccgcagcgcttctgcctggctctgcagcgccgcccggaggcgctctagctcctcgcagccgtcgctgctgccgcagttcgccggtagcacaaacagatccgcagctcctaaccccgcgctgttcagcagagctgctgtctgatcacgggcctgggcggcagtctgtgaatccccaggacggaggttccgcacagccagtagcggggtccctcgggccagggcggccagcgctgcctctcccagggctggagccaacggttccccgttcccctcgggtccgggcagcaccagtaccagcacgttggcttccgccgcccagggccccggcgctgcgggtgggcagctcagctcgcccagaaaaaggcctgggcccgcagctcttaggctgggaaccccggagtccggccgtccctcgggggcctcgagcgtctccacatccttgtcgcacagcgctgcgatcagcgcggacttccccaagcccggaggccccaggaacaaggcggtcacgtcaccctgcggcggaggcatggctggaaagcaacgggtagagaagacctgggtcagggagcacctagccttttcctttcctagccgccccactcggaacccaggcctcagtccttcaccctgtccccttcggttcttgagtgtcactctccaggacctaaaaaatccagagcccagaccctattcccccagaatcccaggcgtcctgtctgtccgccctccctctagatggaaacgtttccctttctgcttcaaaaactctgaaatcaggcgcggtggctcatgcctgtaatcccagtgctttgggaggccgaggccggaggatcgcttgaggccaggaattcgagaccagcctggccaacatgtggggggactctctggtagagtctccgtctcgataaaaaataaaatttagccgggcatggtggtgtgcgcctgtagccccagctactcggaaggctgcggcgggaggatcgcttgagcccaggacttggaggctgcagtgggccgtgatcacaccaccgcactccagcccaggcgacagagcaagaccctctctgaaaaataaataaaaataaaacctcagaaatctggcttccagtccctcctccctcggacacattgttattttcatctttccccttcccccttccaaatcaccaaccgagcaaaaagccgacccacgggagagagcgcagtcggtggcagtaggtcagcagctgagaagcccggcccctgggccgcggcggacggaggccgaagaggccagggagcggtgatttagagatgccgggacccgtcccggtagctttaacctgacgtcactccctctcccaagggggtgtgtcttggaaggccgacagcagagacccagcccttcgccgcgcctgcgcagaacggccgaagtgtgcacgcccctctttggcggcctcagggcctagaacaatgaatgagtcaacgcgcctgcgcgccacgagagcctacccacgcatgcgcaaaaggcttagctagctaagccgcgggaggctgaacgtcatcaaacgcgccatagggcagagaaggacccctcccgttattttgaggaccgggctggtgcgactatactactgccggatggcaaatccgggatctcggctccgagaggctcatctggcaaaagggcgcggaaaccacgggggccctgagactgagtggtccctatcccacttctctctggggcggcgctgtagccagcggctgacaggcgcagcgaaaggcagccctctgctgtaaggaggaaaactgaggcctgggagcaggaacctgtaggcagcgcttgagggtagcgggatagcagctgcaagcgcgcgtgggaggcgggggctctgggcggaacaaaaatcacaggatgtcagaggatgtttcccgggaagaactgggataaagggtgggtatcactacctgccccaagacacttgagattgggatgacgctggtgtcaaagatcaaggcttccacgctgagttcagggagttagtttgatgcagcaggtcataggtcacaccagtgagaagactctaggggagtcccaaacccaggaaatccagtcctttgggaggtttgaagcttcttttagcaagaactccatcaattagagttcaaggagatagtatgtcgtaggggtcaaaggcaggcaaggagagcctctggcgatgtcaaaggtcatagacttagggtgccctctaagactggtaacagatgaacagcttcacttatgcacgctcctctcctgactagaagggtcccagcaccatggaggacccgaaccctgaagagaacatgaagcagcaggattcacccaaggagagaagtccccagagcccaggaggcaacatctgtgagtacacatggctggcgggctagaggagggtggggtgcaggagctgatgctaagatctctgtggcacttcggtgtccaaggcgccacagagttttgcctgttgagaaggggctgtaatggtccctgagctgctctagcaggaagtgcatctcctcacaccagcttatgtggccagagtactcaccctcctctggccacataagcaggattgcaatgcttatgcattcagagggatagggtggcttccaggagaggcttgggttggagatgtggctgggaatggttctattgggagagaaaccccaagattctggtcccaactctgccctagactttcagtgtaacttgggccttggtttccttgactgtcaaaagagggtggtacttcccacctcacagggtgggtatgggattaactgcagcaaaggggaaagctaggggttaatgatggtagccagtttgacatgtaatagcaacacctcctgctcagtgttttattatgagctaggtgtatttattctcatattatgaaccattttaacattcattatctcattgagtccttctaataataggccctttaaactgggaactgaggcagagagaggtatttgtaacaagagctgtagtctcaatgcccttgagccagagactaccaggaacacacctgcagttgaacacgttgggtttctcactgcaatgaacacagaccatggggggactgtggggtgtctcactaagaatggtaaaaacgacacaggatttgggcttgtgggtggtgattttggggaaggttcaagcaaaattgttttgctctggattggatgctaccaggaagcaggggcaattctatgattggctatcgtaataaatcttacccagaaggaggaaggaaggaggcgaggctcaagctctgactgataaagcagcagcagacattcacattagccaggataggaggatgtttggtcatttttctgcttggacagtattcatattttgtctgtgctcagacattatgatgatgtagtcttgtcttgattcattttagtcacagcgtggccttgtctgtccttgatattctgtgaaaatttatgttcaacagaacaccaaggtctagctgtgagtaccaggccagatcctggatgtcgggctggatttctctgtatcattagtcataattgcaaatgactgtacagcaattcatttattccttccaacggtcctatggagtagatactgttattagcccattttccagataaggaaactggtgtaattgcctaggaagtggtggaggtgagattcaatcccaagcagtctggctccaaaggctgtgctgtaatcaccatacccctctgttgggcaggctgactctctgggttccaaccctggctccaccatttcctttcctagcctcatgactatgggcaacttgcctaacctctttgaatctcagtttgctcatccataaaataggtgcaagaacagttctcctgtttggttgtccagcattagcatagaacctagcacataacacattcaatgttaattgttggtgtgattctggggttcaggaagaggtcttggagactcctgctggcctcccctgacctctcccccacattcctcaggccacctgggggccccgaagtgcacccgctgcctcatcaccttcgcagattccaagttccaggagcgtcacatgaagcgggagcacccagcggacttcgtggcccagaagctgcagggggtcctcttcatctgcttcacctgcgcccgctccttcccctcctccaaagccctaatcacccaccagcgcagccacggtccagccgccaagcccaccctgccggttgcaaccactactgcccagcccaccttcccttgtcctgactgtggcaagacctttgggcaggctgtttctctgaggcggcaccgccagatgcatgaggtccgtgcccctcctggcaccttcgcctgcacagagtgcggtcaggactttgctcaggaagcagggctgcatcaacactacattcggcatgcccggggggagctctgagtgcagcttaagcctctccacggtgacgggtggctctgtggctggtaggactcacccatgatatggggtgcaggaactctgggggccctgaaggatttgcttccctcccctgggaaggcagagggctcttaataaagaggacccagaagattcttatttagagcttcagtctttggagcacacagggccttcgtgagacagtgaaatcagataataatgagatcttttgttaaaaaaaaaaaatgggaagggagtgcgggagagaaatggtttgtgtctcccttattcccagttaaatacctagctgcagattgtgccatcacccttcattcttcccagatggatgccatgggctatgggagcaaattgccctggacctttgcctgaatgggggcaggaaaggtgaggtgttgctggcctgtaatgccaccaggtgagttccagatgtggagcaacttgggcttttggggatggggcagcaaagttgggagctggaccccaattgagtgggggtagcaattggagtccttgtgtctcttttccaccccctgccatcctcacttagaggggccatggcactagatggcactagtcccccgataatttatgtctcgttgaaataattttgtatatcattctagtcctgaaatatttttttcatatgtgtaggtgaaatggtatgaataagctaacaggaatagtatctaaaaacagaaaacatccatattaaaatgtctaaacagggagctctggcttttgagtgggaatttccagagaacataagggtgtgggcaggtgggggaactcaggccagagttggcctcgctttgtggggaaactggtttggaatcaaacagagataccttctgtttcgggttttatttggccaacactgggagatttcccattaagatcctattttcagctctcttgaaaggcccaacctaggctgacattgtcagcaggggcaggacagaagttacaacaggctggagggagcagtgggtgtcaccctcaactggagatgagtcccaccaggccagttttacccccttagttacctgccctgcacctgcagacaatggtcgatgccttgcatataatacttatagactctgtttatgttgagggatgtttttaaagcccacaggtgaggtggatgtggtagactgatcactgtctctgtttttagctaggcacacagtagctgaaaagactgcatttcccagattcctttgcagctagatgtggccttgtgactgatttctggctaaattcctgggtagaacagtcaagcttaagaaagggacggctgggcacagtggctcacgcctgtaatcccagcactttgtgaggctgaggccggtggatcacctgaggtcaggagtttgagaccagcctggccaacatggtgaaaccctgtctctaccaaaaatacaaaaattagccgggtgtggtggcatatgcctgtaatcccagctacttgggaggctgaggcaggagaattgcttgaacctgggagacaggttgcagtgagccaagatcgtgccattgcacttcagcctgggtgacagagtgagactgtttaaaaaaaaagaaaagaaagggacataccttttttccaccttcctaactgtaatacggaaatggtatccagccatctcagaccataaggataagagcaacacgtgggaagacagagcaacaagataggagcctgggtctctcgtcaatttcaaggagcacagccaccataccagcccacttccatattgctatctaagaaagaaacttctatcttatttaagccaccattattttgggtctctgtcacatgcaacagaatttacagcctaagacaggggtctgcaaactatggccaactctagcctgctgcctggttttgcaaataaaattttatttgaacagttttatactcattcacttatgtatcgttgatggctgcttttgcctagaacagcagatctgcatagttgcaacagagattttaaggcctacagaacttaaaatagttaccatctagccctttacaggagaagtttgccaacccctggtctaataagacattcaacctactctgagtctggaagcagaaatttccatcctgggaaccaccatctttaccaggtaggtaggtaggtagggtatgtgtgtgtgtgtgtgttttggggcagggctaccctggatctctttgctggggtgacttatggggagactggttggagttagtagaccatcagtttttttcaagataccaacttcatgaagagccagatatttcctctggctcctggtgaatgctccgaagtttccaacccagatattgtcacactacccccacagtggctcccctaaaccaaacctaagtatctaatcccacatgctctcccaagatagcagcctgcccaagtacaccctgggcttcctgttctctccagacatcacagattctctaaatagcatcactgatgacatccacatctttatctgcagcccaaaccccagacataagatataaccacttgaataaacaaatggagatctcaaacttaaaatgggtcaacaggactcctgcggcccaacctgcaccaccattgccatcatgttagtaaactgtgcactcttaaattcttttttcttttttgagtctcactttgtctcccaggctggagtgcagtggtgtgatctcagctcactgaagcctccgcctcctggattcaggcaattttccagcccc[132 bp omitted]gcctgggcctcccaaagtgctgggattataggtgtgagccactgcacctggccttcattttttttttttttttttttttccccttcagacagggtctcgctgtgtagcccaggatagagtgcagtggtaagatcttggctcactgcagccttgatctcctcaggctcagatgatcctcccacctccacctccctccctgtagctgggactacaggtgtgcactactatgaacagctaattttttgtagagatggagtttcaccatgttgttcaggctggtcttgaactcctcggctcaaacaatccgcccacctcgatctcccaaagtgctaggattacaggcgtgagccaccgtgcctggctgactttcagccttctaacacctgtgtaactattccctgtattaaatcctctttggggaatgcctggcctgactccatatcctgaatgggtgctggctgaatgacccaactcctgattgatagtgcctcttgtgatccttaggaatatttgccaatggatggaaattctctatatttgtccttagaagtcctgtcttatggcagaagacaggatggggtgctgctccaggaaacaaaacctatgatcacacttatccatgtgctatagttgaatgtatgtgtccccctaatattcatatgttgggaacctaagaccccatgtgatagtattcagacatggggcctttaggagatggttaagtcacaggggctctgccctcatgaacaagataagtgcccttagaaaaggacccaagggaagtagctaggccttctccccttccatctctcctaccatctgaggacacagcattcatccctttctgccaccttccactgtgtaaggatgcagcaagaaggcaccaacttggaagcagagagcaacccttaattagacaccaaatctgctggttccctgacctgggacttaaccactctccagaactatgaggaattaacctttgctctttatgaattacccagtctcaggtattttgttacagccgcacaaacggactaagactctgttgttttaatgagcctggaatttctgctgatgattctgaggttccatgatgctaagctatagtggctaggaaagtctcagttcagagtgtatcaatgtcaggtttggagattctgggatgagaaacgtgggttttgaaaaatgctttggtctgaaatcctgtaataggtgtcaaaaatgtaaatgctggccaggcacggtggctcacgcctgtaatcccagcactctgggaggccaaggcgggcggatcatttgaggtcaggagttcgagaccagcctggccaacatggtgaaactgcatctctactaaaaatacaaaaattagccgggggtggtagtaccgcgcctgtggtcccagctactcagaaggctgaggcatgagaatcgcttgaacccagaatgcagaggctgcagtgagctgagatcatgtccactacactccagcctgggcgacagagcgagactccgtctcaaaaaaaaaaaaaaaaaaaaaaaaagcagatgctcttcagggccaagcaggcagggtaggggtgtccagatgtgaggcattggtgactgggcacataagagtgaatgcctcccctacagaaagtgactccttctcagcaccaacaaaccactatccccatgggaactgggggttcagcaatatagatctcacaattttcgagacagtccagaaacttcaatttttttaaatgtgaaattacccatttttcaacattggtaaccaacgtaacttaaaaaaattcaatagctctgtggagaccagatacactcctctaagtcagatggtggctgtgggcactagactgccatttctggtgtgtggcttagtggttaagagtggatgcacctgcatccagttgtctgggtacaaaccagggctctgctgcttactggctttgtgacctctggcaggtaactcaacctccctgtgcctctgttgtagcagatttttttttttttttggagacggagtcttgctctattgcccaggctggagtgcagtggtgcaatctgggctcactgcaacctccgcctcccaggtacgagcgattctcctgcctcagcctcccaagtagctgggacaacaggcacgcaccaccacactcagctaagtttttgtatttttagtagagatggggtttcaccatgttggccaggctggtctcaaactcccgacctcaggcaatccacctgccttggcctcccaagctgctgagattacaggcatgagcaaccatgcctggcctgttgtagcagttataaaatagtcataaaggtagcctctaaggattattatgagcactcagattactgtgaggactcagacttggagacaatgccaaagtcagtatatggctcttacggcctggttctccgctactttctgacctcacctcttacctgtcttcctcagttccagcctcgtggccctgtgttctcttcccaagcaccccaagtgggctcccacctcgggccattgcatttactgtccccacagacagccacaaggctcactcctgccccttctctaggtctctgctctgatgtcatctcagtgaagccttccttgaccaccctacttaaaactgcaaccttcacacacacaagcttcccaccctgttcctttttctccatagcactta[143 bp omitted]gcctctccgagtagctgggactacaggtgcccgccaccatgcccagctaattttttatattttt[133 bp omitted]tgattactgtcttccccattataacctccacaaagggagggggtttttgttcattgtgttgactgctatatttccaactcccagagcagtgcctgccatctcataggtgctcaataaatcattgttgggtgaatgagtaaacaagtaacagtccctaacttgtaaggatctgatgtgactgtccacataaagcactgagcccagggcctggtccaccgtgagcgctgacttaatgatggccattacagtaattcaggttctattcttgaaggttcttagtctccaaccttctatgagttaacacatgtaaagcgccttagaacagggctggttgcccagtaaattctcagtaaatgatagctattattataattaggcttctattttcaaagtagcttcggcgccaagcttctgtgaattacgaattagtacttcccatctctgagcccaagttttggcaaggctgtaaagagctggtcctttgctaccctttgacctcatccctacagctctcgcctccttggcacaccaggcaggctcctgcctcctccagcctgaagtgctcttccccattgatgtacatggctccccccggcttcagatctgtcaccttctcagggaggactatactctttaaaattgcaacctccttccagaacagttctcccttcagtccttttttaaatttttttcttgcaacaaattcctgccatcatccaggctagagtgcagtgagcacagtggcacaattacaggccactccagcctcaacctccaagcctcaagtgatcctgaatagctgggaccataggcatgcaccaccaagcccagctaatttaattttttgtagatggggtctcactgtgttgcccaggctggccttcaactcctgggctcaagaaatcttcccacctcggcctcccaaagtgctggaattataggtgtgagccactgcacctggccttccttcagttttttttttgtgtgtgtgtgtgtgtgtgtggtttttttttgagacagggtctcactgttgcccaggctggagtgcagcgacacttcttaggctccagcaatcctcccacctaagcctccctagtactaggactatagccgtgtaccatcgttagcccagctaattttttgtattttgtagagatggggttttggcatgctgcccaggctggtctcaaactcctgggctcaagcgatccacccacctcagtgctgggatttcaggagtgagccaccatgccgggcctcctttcagtgctttattgttctcacagcatttatcagcacccggcatatgctgtatcttacttgtttatgtctgtcttcaccagcagcctctacccactcccatgtaagctccatgaggacaacgattttattttattcactgctgtgttcccaatgcttagcacacagcaggtactcaaaaatatttgttaaatgaattaatggatcacaatccctgtctcacagggttattctaagaagctgataatctcatgcaaattaagtacagcactctgtaagtgctgggaaaatggcagctgcaattatcattaaggttctatttttgtaagttcctagatgcaccatttctatgagtcaatatatataaagcccttggactggcaccagatacccaggaagcgctgagaaagcgtagctgtgattataattaaagtcctctttgtggaagttcctaggctatgtggcagaaagccctagctgtcctccatgaactgttttctgctttctgggcgcttggctagactgcttctcccaggttgtttttgcagttagctgcggccacatatctaatttctcagcaaaggcgtgtcaatggaagcagtgtgtgcccctggcaggccagggcttgtaagacaacacgtgcacctcaccaggcatcctgtcctcttctgccagcaggacccaggctatggccacccagtctggaccatgggggagacaacaggcttaagggatggcctgggtccccaaatgactcacccagcaccattttgtgagtgagaaacaaaattctattattagagcctttacattatggggtctgtaagtaaatacatggaaacctcatcgaatacaagcacgcagtaaatgttatctttcccaaaagaccccaaggttccccaagaaggagcccagggggaatacacacacacacacacacacacaaacacacacacgggcgggaatacacacacacacacacacactctgaaccaacacacacagatacagattttggcttttattctggccatcacacatctacttctaagacaacacagaccggcagtaccccatcccccatgaccactgtcacaaccccaatttcctcagccccctcctcccaccccaccccttctgccaagctccccgtatgggggctctgcctacacctcaccccgggcatgcagcatgaagtgcccgtgcagctcccccaggttgtcgaaggaatcctcacattccgtacagtggtaggttccctcctcctcctcttcctcctcctcctcccgcccagctggtcggccctccccagcccgaggtggttcctcctcttcctccccgagggccctgccttcaggggctggtgcttcctggggggctgtagcagggcagcagagccggcagggtggggttcccggtggggcctccccaaggggtgagcggccacagagctggcaaggctgggccgggggctgggctgcacggggggcccggcgggatgggccaccacggcccccgccaaggcgctgcttcaccttgtagccaggatcatattcaggatcgtcagtggtctcctcttcctcctcctcctcatcttcttcctcttcggagtccggctctgagagagtgtattctgaatcagaggaatgctcggggcctggagggggacagacaggggaagacagtggtatcagaggaaagagggctaggccaagctgtcccctccctgaatccccacattcagacttgccatagtatgacaaggatagcctagacactacccttcccttccccacagatgagtccccatggcacagaacaagactggcacccagtagattccctgtatctttgtgtcaagcaaatgaatgtcttccaagaactgcatgggacaggactgggcacagtggcttatgcctgtaatcccagcacttttgggtggccaaggtgggaagatcacttgagcccagaagtttgagaccagcctgggcaatatagcaagactccgtctctacaaaaaattaaaaaattagccaggcctggtgatgcattacctgtagtaccagcttctcgggaggctgaggcgggaggatcacttgagccgaggagttccaggctgcatttgagccatgattgcgccactcccttccagcctgggtgacagagtgagacctcaccacttaaaaagaatttttttggccgggcgcggtagattactcctgtaatcctagcactttgggaggccaaggtgggcagatcatgaggtcaggagttcaagacaagcctggccaacatggtgaaacctcgtctctactaaaaatacaaaaattagctgggtgtggtggcgggcgcctgtaatcccagctactcgggaggctgaggcaggagaactgcttcaacccaggaggcggaggttgcagtgagccgagatcacacaactgcactccagcctgggtgacagagcaagactctgctgtcttagaaaaaagcaaaaaaaaaaaaaaaaaattatttgattctttcgattgattgcaaaagaaaacaaaaactccatggggaggtggggtgggaggcatttaggaaggacaaagccggagtagtaaaaacccaccagtaacaacagcatccttgctattgtaggagccctgttcttatacattaactcactaaatcctcaacaaccctttgagggtggtactattactatccccagttgatggatgtggaaactgaggcacagggaggctagacgactcactcccctgtggttacacagctctggcaggaaaagctgaacctgggccatggctgacactggatcattttagggagacaaccatttgaaaaggtatttgtgcaaattaaaacacatgcatacacacagatgtacttttatatctgtggccatggagagagagagagagagagttaggtgaattaaaacatttatttataggtaagatatattactgtgatttcacagttatcaaggacaggcctaggacaagtttaggtttaaagaaaaaggcctgtaatctagcactttgggaggctga[133 bp omitted]tctgaggcaggagaattgctcgaacccgggaggcggaggttgcgatgagccaatattgaaccactgcactccagcctgggtgacagagcaagactccgttcccaaaaaaaaaaaagaaaaggggaaaaatttatagttgatatacggaaaagggcgacatcagctgccattatgggggcgcacacacagagtaatggttggggatggggtccctgtgaccacggtgtgggaagtaccagcttcttcggccttggtggtaggagcctgccaaaagcctcaccttgtatccatcccagccccattcctcagtttctcccagaacccagaggatcctgctactgcaccctgtgctccgcccttgctcctgtcatcacagtggccacaggctcttcataccaggctcctcaccttccaacaccccaggcccatacctgcctcagggtctttgccaccctttctgccgatgtcactctccattccatgtctcttctcaagtgtcaccttctcagtgacgccctggccactccccagcactccctacgccccttactctgcttgatttttctccatcttcttttgagatagagtctcgctctgtcatccaggctggagtgcagtggcgtgatctcagctcactggaaactccgcctcctgggttcaggcaattcttctgcctc[133 bp omitted]tcagcctcccaaagtgctgggattataggtatgagccaccgcagccggctcatttttctccatcttctgactcactgcattcaacatttacttgtgtgtttgtttactgcctgtccccgagagctgggactttgtctggttcactgctgtggccccagcatctaaaacacttcctttgtgcaaagaaagtacttatgacatatttatggcatggatatctctgcatggaatttgacaaaccttttctgaggcttcacacacactgttcctccctctggtgggaatgtcctgccctagtttttcccaccatcctttaggacccagtgggaggccttcctctttggtgaggccgtcccagacctcctcatcccaggcagccagtcactttttttaccaccctcctgctgggtccccagcatcaccagcccagaacaggttataactctttccttctgaacatccgtccctgcagctctctcctactagttcctgccatttaacaatcgtttcctgaggccttggtatgggctgttccccactctatccacctggtgaccccctactcatccttcaagacccagcacaaactctgtcctctgtgaagccaccaccctgaagccccaggctcccagccaggtctctctccagcttcccctgccccagcacctcctcctgttactgccctagaagctgactgcagtcagctgccccccagggtatctcccttatctgactgggaactcctcaagggcaggtatgatcttggggtccgcagcagaggacgtgtgggtgagtggatgatagtggccccaagaccctgatctccctccccaaagccttggcctctgctcctcgcccacctggttgacccgttcatttttttttttttcgagagagagtctcgctgtcacccaggctggcgtgcaatggcgtgatcttggctcactgcaacctccgcctccaaggttcaagcgatcctcccacctcagcctcccaagtagctgggattacaagcgtgtgctatcacacctggctaatttttatatttttggtagagatggggtttcaccttgttggttaggctggtcttgaactcctgacctcaggtgatctgcctgcctcagcctcccaaagtgctgggattacaggtgtgagccaccgcgcccagcctgaccctttctttctctactggcaaaactcctgctcctttttaaagccaagctcatgtcacctcctctgtgaagtcctcgctgactccccaagcggtcagtgtctctctcgtatgggctccccggcccctgcactgctctccatcacaccctgaccactctgggcagtggcccccctccccacccactgactatgggctccttgaaggcagggcctgggtctgccccatctctgtgtccccagcaatgctgggcatgagtcagcctcagaagacatctgctgaatggctgcaaaccagaggaaatatctccagcctcaggctgggacccctcccctctctcctcccacctctgacttcataccactcaccctccagagtcttcaatgcccactattacttcacacagttggcctgtgacaggcaatcaggtcatcgtccacggctaccaggtgtttcatgtctactgtgacttccaggaccacaagcccttttgcgcccaccatgtcttcacctaagagatcttcaaagcccagtatgtctctggcacccagtggatcctccatgcccactgcggatcccaagcctcctgcctccttgaagtccaccaaatcagcaacacccaacagatccttagtgcccaccaaaccagcgacatcccgtaactcagtcatgagcccaagcagttccaagtccaccaaatcgaccagtacaaaaagagccccttctaaccggcccagcagcaggtcccgagtccgcagcaaagcaagaacacccagcagggtgagcaccgacaccaggaccagcaaagccagcaaggccagcgacgtgagatgccaccagcggaggggcacacacagccggggtaggacacctggcagaaggggaagccgcagctccaagaggtcacccagcagggccagcactcctggcaggataagaactcatggtgccagaccaggcatggccagcagggtgagaactcccacttcacagcaaaaagggagccggggaaagagttacggccggcctagaaccagcaacagggaaaggagtgacagccagcctagaaatctgagcaagaagagttaccgcccaccaggaggctcaggtatagggaggagttccgagctggctgtaactcccagtacagccaagtgtcaaaccccgactggaattccctccaaggagaagagtgacaacccatctccatcctcatcaaggaaggtgaagagctacggtcagatgatcatccccagtagggaaaagagttacagccccactgaaatgtccagcagggtcaagagttataaccaggccagcacccgcagcaggccgcaaagtcacagccaatctagaagccccagaaggtcaagaagtggcagtcagaagaggacgcacagcagagtgagaagtcacagttggaagagaaaccatagcagggcaagaagtcgcacccggaagggaattctgagccagatgggaagacacagccagtctagaagccacagcaaggggaaaagtcaaaaccaatctagaacccccagaagaggaagaagtcacaactggtctagaaaccccagcaaggaaagaagtcatagccattccagaagctccagcaaagagagagatcacaggggatctagcagccccaggaaggagagtggtcgcagtcaatcaggaagccccaacaagcagagagatcacagccgatctagaagtcccaacaaggcgagagatcgcagccgatctagaagtccctacaaggcgagagatcgcagccgatctagaagtcccaacaaggcgagagattgcagccgatctagaagtccctacaaggcgagagatcgcagccgatctagaagtcccaacaaggcaagagatcatagccgatctagaagtcccaacaaggcgagagatcgcagccgatctagaagccccagcaaggaaagagatcacagccaacttggaagccccagcaaagagagagatcacagacgatctagaagccccagcaaggagagacagtgcagacaatctagaagctccagcaaagagagagatcacagacgatctagaagccccagcaaggagagacagcgcagacaatctagaagccccaacaaggagagagatcgcagccaatctagaagccccagcgaggagagagagcacagacaatccagaagccccagcaaagagagagatcgcagacgatggagaagccccagcaaggagagagagcgcagacaatctagaagctccagcgaggagagagatcacagccgatctagaagccccaataagcagagtggttacagtcgacctagagcctccagcaaggagaaagctcatagccgatctagaacccccagcaaagaaggaaatcatagccaatctagaacctctagcaaggagagcgaccccagtcaatctacagtccccagaagtcccgactggaagagatcccctactaggacaagcagtctcagtcagaatagaacccctagcaagacaagcagccactccccatcaacatttcccagtgggggccaaaccctaagccaggatgacagtcaagccgacgccaccacctctaaggccaccttacctggggaaaggtcttcatcatcttcttccaagctggcgtagcccccagtctcagctggctcacgggtctctgtcatgaccgggggaggggacaggagacaggagcagagcagcagctgagcagcgtccctccccggccagctctccacagccacacctccggccacaagttctctaatacaggatgttggcaggtagagagggatgctggatagggggaaaggaaagacctgtgatgattcaataaatttttacatagcacccatccccaccaagcccaactgtgtgctcactgctggcatggggcacagaggaccccagctctgtccctgactgtctacagggtcttgactgcaagccctgcccctctctaggtcttttttttttttgagacagagtctctctctgttgcccaggctggagtgcagtggtgtgatctcagctcactgcaacctccacctcccaggctcaagcaattctcctacctcagcttcccgagtagctggaactacaagtgtgcgtcctcacgcccggctaattttgtatttttagtagagatggggcttcaccatgttggccaggctgggctcgaactcctgacctcaggtgatccacatgcctcaacctcgcaaagtgctgggattataggcatgagccaccgcacccgtccccctctctaggtcttaatttccgcatgtgggcaacaaggctgccttctggttcttattcagtggggtagggagaggtgacactccaaatattcaacagtggggactggtgtgggcaccaatcagaactgagagtggagcgggacggataccaggccttaaccctttagttgctggaccatggggaggtctggggttggggaagtgttatggggaaaaaaaaccctcaaactgtgtttttcctctactctcacactatcacaacaatcatcaacacagaattctgtgaccaaatgtgtggggctttttccccacacactacacagcagacaacagctaggtgtcccctccgattccattccaacgctgtccccacacccagctaatttttgtatttttggaagagaca[215 bp omitted]caaacttgtctctaaaaaaaaaaaaaaaattacaaaagttagccggtgtggtggcatgtgcttatagtcccagctacctgagaggctgaggcaggaggataaattgagcctggaaggtcaaggctgcagtgagccgtgaccttgccactgcactcaagcctggatgacccatcttacaaaaaaaaaatttttgctggagctgctcacagaactcaaggaaatgcttacttagatttactggtttattatagaggatattgcaaagaacaaagatgaagagatgtgtagggcaaggtataagggaaggggcagggagcttcacgccctccctggggtgctaccctacaggaaccctcaggtggttagctatgcggaagctctccaaacccagtcctcttgggtttttacggaggctttaagacagcagcattgggcatggacttctctgaaaagtgtcttaagaccaacaatcaagaaggtggggaagattagagtcttgccctggggcaggaaatggagggcaggaggaggtcagagagattctgtttcttcagacctgccccaggcctaaggtacacaacattataacaagagactgtaacaaaggctgtaggagttaccagccaggaactgtggatgaaaaccaatatatttatatatataataccacaaggggggtccaaagtggcagttagggacagggagtacttgtgtagcagtgacacaccaacccatctggaagtattttaatatttaaacaattggtatggctatactagtttgtgattatcagccttagttctgtatcaattggcaagatagtgtctaggtttgccacactctagctgtgtagcaccaagcaaagaacttaacttctctagcctgtttccttctctggaagaaaggggcttccaggccttaactcacgtactccccataactagactgggaattatctcctttgtacagatgaggaaacagacacagaggtgataagtgagtagcccaaggtcaccatctggtaagtggatgaactaggattggaagccagacctttcataaaatgatttctcagctcaaaaggtttttctgaagattcagtaggctcactgatagaaattgctggtgtgtggctggtattccatcaagagtggccattactactcccacccctgcccctctataaactccagatgttccagacctctcatctctccctgtgcacacaaggccttttcacatctgtgggtcttagtacacccactgttgctgtcaagaatgtcctcctcctcctttttttttttttttttgagatggagtctcactttgttgcccaggctggagtacagtagcgcgatctcagctcactgcaacctctaccctgcatcagcctccctagtagctgggattacaggcagccaccaccaccatgcccggctaattttttggtatttttagtagagacagggtttcattatgtcagccaggctggtctcaaactcctgacctcaggtgatccatttaccttggcctcccagagtgctgggattacaggcaagagccaccacgcccagccctccttccccctttttggcctggagaactccttttcacccttcaaagcccaccacaaacataagaacctctatacttcttgcccgctgaaatactgcctctgccaggaagccttctgtgacttctctctctccctcttcaccaacggaccgcccccgccccccaccaaccccaccacacacacacaccactactgtcttccactgtactccctgacagtagagaaccaagcagggccagttgatgcagcctcagctatatctcttacatgccaaggcccatgcactggggatacaatggtggaaaatacatggtcccttcaaagtctggatgtcaagtttaatgctggggactaaagagaaaagcttcagattgaaacctggaggtggctggggcaaaggaccattggcatcattggcagggcaacttcctaaagaaagcacctaaatcttggcttttaaagacagatttcataattggcagaggagaattctaatgataccctattgcctacagggccccatctaatttgggaattctactttataccaagataagattgccagatttagcaaataaaaacagaagacatccaattaatttttttgtttgtttttgggtttttgttgcggagatggtgtctcactatgttgcgaaggctgctgtcaaattcctggctcaaacaatcctcctgccttggcctcccacttcccaaagtgctgggattacaggcatgagctaccacacctggcccttatttatttatttatttaattttcttttttgggacggagtgtcactctgtcgcccaggttggagcgcagtagcgcgatctcggctcactgcaacctctgcctcctgggttcaagcgattatcctgccccagcctcccaagtagctgggactacaggcgcgtgccaccatgcccggctttttttttttttttttttttttttttgagacggagtcttgctctgtcgcccaggctggagtgcagtggcacgatctcggctcactgcaagctccgcctcctgggttcacgccattctcctgcctcagccttccgagtagctgggactacaggcgcctgccaccacgcccgacta[174 bp omitted]cccaggctggagtgcagtagggtgatctgtaggaaaggggcttccaggccttaactcatgtactcccccataaccaggttgggaggttagctcactgtaacctcaaactcctgtgctcaaggtaccctactagcccctaggagagcagctgggactacaggtatgcgccaccatgccaggcttaatttttactttttttttttttttttttttttgtagagacgggggtctcactatattgcccaggctggtcttgaactcctggtctcaagcgatcctcctgccttagcctcccaaagtattggtatcactgcaactagcccaaagaattaatatagctatgttccatgtgatatttgggacatacttttctaaaaggttgtatcttttggatataattgtttatctgaaattcaaatttaactagacattgtatattttatacggcaaccacacacctgggacaatcaagacattccctgaagttaccaggagacaatgcccatcagcctacacttttccaagcccacgtcacacaaggccccttccagagtattccagacgtcaggtagggccatcccttggttcacaagtcccactcctaccacgcctatggcagccaaactgaaaggcaaacacagtgctggagaccccacaatgccctgggcctatagcagtcaattcccaagatgccccgcgtgaacacaataggcacccgttccaatgctcgagcaaagagaccagggcaaaaccttccactacgggacaataacggccagttcccacaattcgttgtggcagttcttcccaggatgccttaggcctatagcgaccaccttcccagactccccgtgtggaagcgctccaagcctccaggacggtcagcggcaggtgtgggataaaaggaaccggtctcgacaaggatctgggacactctttcccaggatgcaccaggcctacgactagcggaccgactcccacagcgcttcaaggcggagcgctcggttctcccaggatgccccagggcggcacaaacgcgtagggggagaaaaagaagccctcgggtcaccacggccccagaccgccggctccccggtgacgggagtcgtcgctcccatcatgcagcggggccgtagcgcccgcttcccggcatgcctcgcgcacccctgcccgggacactcaccggcgccggcggcccccgctccggctctgcggcggcggctgcacgcccagcctctgcgcctgcgtcgcaagtagggtaggacagcgcgcagggggcgtgaagagcctagggcgcttgcgcggcgagacggactagtcctgtagcgctgtgggaagaggggctatgcgcgtcgggccgtcgacgagacccgcgcggggggcgccgtgctttgcccctcgctgcctgggtttacttggtacagcccgcggcccaaaggaacaagaagctgaagggttcgcgcgtgcgtgtgcggggcaggaacgcgccttacaaaactgggatgcgctgggggtggagggcgctagttcggactggatcctgggcccgaggcctgcttatttgcataatcctagcgcgggacaatgaaaggcctcccgcactggaaggagtgatttgcatattccccggaggggccttactccagagcgcagtgattagcatatggcgggggcaacctgagcaaagcgcatgcgcgcagggactgcagactgacgcgaagtgggtagccttgtcttcgtaggggatcagtttgcatcctgagagagggcacgagggccaggacccctcccaaccaggataaaggtttattgatctcctaggtgtcaggccccatgctggcggattctgtggtttctgcagtgaaccatactcctgtactcacggcaccccagtcgaaggagatacgcacctaattagacaactactacccagaaggtcagacctggagtgaggaacacagggggctgtgggagcctaagaggcgcttgccccggcctctggttctagaaagacttccaggaggtggtgatccttaagccaagtacgaataggagccaactagaatgggaatgggtctggcagaatgaactgcaagcgccaaggcccagaggccaaaaaaaaaaaaaaaaaaatagaagcgcatgttttgattgaggaagcaagagcagcttagtatgcctagaacctaactggagacgggaaatggttctatagacgatgttagagttcaactatggctacattccagtcttcctgtaagtgactttgtcacattctggcttaaaactcccccaaagggatcccattaggaaaaaaaaaaaatccaaaaatctttatcatggcctcagggctatacacctggtctggccgtgcttatctttctgaccccacctacttcctcctccctccatttctgtccagctccaccttaccccaaactctttaccagctcgggcctctgctcttgccgttccctccgcctgaaaatgcttttccctctgacctttgaatacctactcttgtgctcaccattcatatcttggtacagatgtcaatctgagaggcttttcctgatctctccataatagcacttacacatttgactggagttatggataaatcgggattggccatgagttggtggtggttgtaactggcatgaagagtacatggggctgggcgcggtggctcacgcccgtaatcccagcactttgggaggccgaggctggtgtatcacctgaggtcaggagcttgagaccagcctgggcaacatggtgaaaccctgcctctattaaaactacaaaaattagccaggggttatggggggtgcctgtaatccttgctacttgggaggctgaggcacgaagatcacttgaaccctggaggcagaggttgcattgagtcga[137 bp omitted]actaaaaatacaaaaaaaaaaaaaaaaaaattagccgggcgtggtggcaggcgcctgtagtcccagctactcgggaggctgaggcagga[133 bp omitted]tgggtttgaagttttccataatgacaatggcataccacatcaccatactctgcatttatattaatagttcttatcacaatctgaactttctttgcttccttgttttgagtgttttcctcatgaaagcttcatgagggtaagaatggagtcgccctttttcactttgggttctcaatgcttagagcaggatcagatttcagattagtgtagcgctgtctttaacacttaacatttgcctgttttattcaccatggactctagaactttgagcagcacctggcacatcgtaagaggttattttttaaagttagaataatacatctaaaatgtacatgaatgaatgagaggcctgggatgccagactaaagagctttgacttggtctaaaggtgatggggagctaggcaaaggttttgagagtttaactttaattcaaagttcccttggagactaatgtctggggtagggggaagccagggtaagggtccgggccatggaatggggtagctcagtcgctatcaaaaagacaagactgtgactatttggctgaagaaatggccaaacccaggtttctggggaggtcgaggtaccctcagtgaggtcaggaccttctcctggcctatactgtccaccagcaaccatcacactcctccctcccctctcccttagttcccctcccaatggtacagcccttgacagcaggacagacacacagccaccccaaacacttgttctctcctcagtttaatggtggttagtgagattgccaaaccccctccccattcccctccccaccccgtacaaaatgtgtgtgtggttttttgttttttgttttttgttttttaacaagaaaaagggggcaaaagccaggaatggggagaggggggtgcaatctgatattttcatacagacttttgattttttaatatattatatataaaaccatgaagaccacgaatcctccccaaactcctttccccctccccggggggcctggaggagagatggggaaggcccccccaggagtgggtggacagagagacaaatatggatgggacagacgttgggggagaaggtagagagaaggggagcccaggaacctggggaagggggattggagaaaagggttggggctgtctccctcactgcccccatcaaagttatgacacaaagacacagaatccctatttccacgccctccccccacccatccccccaccgtgcaaacatggctttgcaaagaagtgcccagagctctgtggaactcttacaatggctggcatggggtctaggacccccaaagaaatctgtgttccccttccctgccccccccacccttcccagaaactgaccccctccccacaagacctggttttgtagcctaggggccctggccttcccccagttatcttcccccaacccaatccctactgccctcactggacttggggggtctggacctttggcccctgccccctgggggacccagacctctgggccctcacttctggcccttacagagatccaggcatccaacacccccatccctgcccaagcgtctgaggtgttagtggtggggggagaagcccaccatcccagactctggtaaatgtctttgctggttccttgcagctggcagtgggggggaccccagcccaggcccaggcctaggcctggggtggggatagggtcagatgaagaattcctctttcctcttgtgtccgtcgctgccattgaggaaggcttctcttgcttctccctgttcatccaagccactggcttcgtgggtcagataggaacctgagggggtgacagacccccggggcaggggggacatatttgtggatccaggagttggacagaagtataagggaagagggagacagacaagacacatgccaggcgaaggaagagggagaaacggaacacacagggagaggcagagaaagaggtaaacagtggcagagaaagaggtaaaagcagaattaggaagactccaaaagctcaccgaaagtgccacccttatcctttctcttggaggtatttccttgccctgctcccagcgaattcagcaattaggaaaataaattgttttattcaaatccatgctctttttttcccctaattttttgtatttttagtagaaaaggggctgcgccatggtgcccaggctggtctcgacctcctagcttctcaagtgctttatccgccttggcctcccaacgtgctgggattacaggcgtgagccaccgcgcccaaccgcaaatctatgcttttaattcagcttctaaattctaccccttttcgagtattgtgccgaaagccccgccccctttgtcatctccgcccccggtgcggcgggatttggaatccagagcctaggctccgccctctcgttaccctggctctaggccccgcctctttccgagccctacaaccaaccaaccgtagagtccaggccccgtcccactcacccttctgccgtaccgagcaccagaccatgcccactagcacacatatgatcagaaacaccagcagcgccaggatgccgcccacaatggcatagggaaccgacgtctgagcctctaccaccgcaccagggtctgccagagggacacggcacaggaccaggtcatcagaggacgatcccagtctggccccatcgctgccaagcttttaagccattctgcacacgtctaaccgtgcccttttatgtgccacacccctcaaaaattactgccaccttgtagtctcttctctttccagatgcttgttggtttgtacactgcccgacccctcccctgagtcatgttacattttccttttctttttcttgttttcttttgcagagacgggggtctcactatgtggcccaggctgatcttaaactcctgggctcaagcgatcctccggcctaggcctcccaaagtactgggattagaggcgtgagcgaccgcacccagccatcccttttcttttgactcaagtttcttcctccactaagaaacagagtccaagaaacaggtccaagtcccttcccaccttgtctaaaacgctccaagtatttaaagtgctgggcccaactaccaaaatttctgccccaccgtcatagagctaaacacagaacagctgtgtgctagagcccattccaaccaccttacatatttagttcacataatcttcacaacagccttgttatataggtgctattgtttatttccactttactgatgggtaaactgaggcgcagacaggttcggttacctgcaatagaatgcagccaacccgaatttgagccccgcgggccagtctggtcccaaaacaaaaagaactctgttggctgccgaacccctgagttatgtggcctctttgctcaagccccgcccccgccacctggcgccccgcccccgccctcagtcggccgcagcctgctctcaccgtagaccacaagtacgtagagcgccctcgcatggccgtgcttattggacgcctcgcaagtgtaggtgccgttatccgcggataccagacccggcagcgtgagcgtctctcccacggcctccgccctctccggcaaagactcattcccgcggttccagcggatctggtttggcctgggtggggataaagtatagtgagagttaggaaccgaggtgccagcacccaattctgacttgtcaagaatctagacatgcaactctcatcccgcagggacctccaaataagaggcttcctgctatctctttcctttctggaaaaccaacagtcctgggcctacttccacccatcaccaaggtctcaggaattctagcccaggctgaacatggtggcttatgcctgcaatcccagcactttaggaggctgagacgggaggactgcttaaggccagcagttccagaccagcctgggcaacacagggagaccccgtcactacaattaaaaaataataataataataataataattctagccctcccacgccattccatcctcagcaaccaggagtctgaggctgcacagcttcagtattggggagtctgagcctccagattcctcctccctcaggatccaggagtccaggtcccagatccctattcgtccaggtccccagctctctcctcctcaggacccaggaatccaggtcctagctccctgtttgtccaggtcctcagctctctcctccttaggacccaggagtccaagtccctggtccctgttcttccaggtccccagctttctcctcctgaggacgcaggaggcccccagagctcacctggggttccccgtgacagcacacgtcaacaccagcgtgtctccctccctcaccacagcttgggaggcatgaatccgggccgtgggggagtctgttaggcaaaagtaagaggagagagtagtttccaagccatcacgcaggacaagggggaccctcgcgggtgcgggtggctggcgttgggatcccttgggtcctggcccgccggtcacttacactgcacatccagcacgtactgcgtctgcttgctgtgtccggagggcagcgcctggttctgcgcctcacagatgatgataccaccgtcgtccttacggtccacacgaaaccgtactgtgcttgccacgctccagaccttgccattttcctggctgctgctcactcctgccacaccccggtcagacactgtcaggccacaattccggctccatccacccacccacccgagccaacgccaaagcaggctatttgccaagctccaccccttacccacaggccccgcctcttgtcctccaagctacgcccctcccctaaccaagcccacgtgcctcctcccaaagctcttccctctttcacgctcatgctttctcgtctatcaatccatttaattgctatatatataaaaacataaatttatatatatacttagagacagggtctcacaatgttgggcaggttgaactcctgacctcaagcaatcctcccatctcagcctcccaaagtgctaggactacaggcgtgagccaccgcgctcgacatcaaccactacatattgaatgtccagtgtctgtgaaaacctgtggctcctctccacatataaacaacctctcctaagtcccacctcctccccatcccttgtcagcactcggcccagggtacctttcagctccttgcggtcccggtaccagcgcagggtggcagccggacgggaccgcggaacgaggcagctgagctccacctcgccgccctctaccgcctgctcccggacctccaccacaggattctctggggccactgccgcagggagaagggaagtaaggggttaaagaaggcacgaacgtgggctcaaagcgatcgagctgcctgttcccagcgaccatagggaaccagggtcccaggtggcaggggtcaaaggggagaggtcaggagccagatgcccatccaggatgttaaaaatagccatggtctgaaagtctcaggagaagagagaagcagagaagaaaggaggagaggatgcgtctgacaagggggagggcgttacctagtaccgtgagcgtggcaatctggtggtgggtgtcttctgtgtagagctggcagaaatagcccccctcgtcctccaggcgggcatctgagagccggatccgcacccggcgtggggagaactcctcaagctggaaacgctcatccttcaaggctagagagagtgagggggaaggtgtgaatttcgggagtcctggcctcacaagtcccacccttccgacaggagcttagagtccagccctctgcctcttttctccagccatatctatgagtctgaggtgtccaactatttactcccttgaggacccagcattattcaagtcctcctgcctgcaggaccagcagtccgggaccccagccctttcttctccgagacccaggagaccaaactctcaggtgtgtcctctttcaggacatgggagcctgggccccagccctctcttcctttaagactcctgagtctggtccccagcactcaccacgggtgccattgaagaagagggtctgccgggctgggttctggatgacaactatggacccatcatactggtgcagacggcaggtgatctcagccaccccaccctcagccactgtcacgttctctgtctgtacttcctgtcctgcccctggacgattagacaaagagacaggatagaagacttactgagagctgcaattcaattttttctttctccctcttccccatccaaacctccaatccctctctttcccctcattcattccattgcactgaacatttcctgcaggctagagtccaggacagggaggaaatctgctccctactctaaaagagctgcagtcaagatttagtagaatatgctctaatgagggcagcacagggcacactaggagcccagagcaagggaggactattatagaattgcctagagagatgggtagccagagagggctctgcaagaaagctccattggatctggatcttaaagagtaagcaggaggctgagcgcggtggctcatgcctgtaatcccagcactttgagaggccgaggtgggcggatcgcaaggtcaagagatagagaccatcctggccaacatggtgaaaccctgtcactactaaaaatacaaaaaaaaaaaaaaaattagctgggtgtggtggtgcgcacctgtagtcccagctactcgggaggctgaggcaggggaatcgcttgaac[138 bp omitted]tgtgttcaccaagcctcatctttcacacctgggcacatgttgtagcccgtttgcaaagatagccgtaatattctcctgtccctggacatgccctttgcaagttgattttgccattcctcccattgagaaggcactttgtcccctactagtctgggtaagccttgagagttgctttgaccaatagaatttgctagaagtgatattgagcctaggcctgaagaggccttgtagcttccactcctgccctaagactgttgcatgaagatacccagactagtgtctttgcagatgaacaatcatggtgaaagagaagcccagccggcagccagcaccaatcgccagctgtgtgagtgtggccatcctggatcatccagccccagctgccccaccagctgacagcagccacacaagtgaccccagttgagaccaataaaagatctgcccatctgatacagcccaaactgctgaaccccagaatcatgaacaaataaggtggtggttgttttaagctcctaagttgtgggtgatctgttctactgctaaagttaactgatacaatacataattaggctatacttcccagcatcctttatagttaggtggggccatgtgaccaattctggccaatgggatgtaggtggaagagaaacacctcttgcagcctgacccatctccctcataatccttcacactggctgaacagagaggactccaaggagcctagaggagggcagaatcacaagccagaaggaacctgggtctctaactgactgtcccccatgacccgcctgtataggactgtgatatgagcaagaaatatacctttttgttaagccattgagatttcaggggtgtctgttacagcctttaacctaccctgattaatccatcagaaaaacaaggtggggaatctagaaccatcagagaaaagcatttaggaaagctgaaagccaagactaatcatcagcattaatatcatcatctgttgtcttcaaaataacaataacccccatagctaccaattattaggtacttgcagtgttagtccctgtgctaagggcattacccatataacttacctttaatcctcacaatccctgtgtaaggtagacatgattattatcattattattattattttgggacagagtattgctctgttgcccaggctggagtgcagtggtgtgatctcagctcattgaaacctccacctcccaagttcaagcgattcttcagcctcagcctcccaagtagctggaattacaggcatgcaccaccatgccgggctaatttttatttttagtagagacagagtttagccatattggcctggctggtctcgaactcctggcctcaagtgatccgcctgcctcagcctcccaaagtccagggattacaggtgcgacccaccgcgcctggccaattattattattatttttaatttgagacaaggtcaggctggagtgcagtggcacgatctcagctcactgcaatgtctgcctcccaggctcgagtgatcccacctcagcctccccagtagctggaactacaggtgcacaacatcacacctggctaacttttgtatttttttagagacggagtttcaccgtgttgcccaggctggtcttgaacttgcgagctcaagtgaactgcctgcttcggcctcccaaagtgctgggattacaggcatgagccactgtgcccggcctgcgctattattatccccattttgcccggcctgcgctactattatccccattttcccccatttccatttttcttttcttttttttttttttttttttttgagacattgtcttgctctgtcgcccaggctagagtgcagtggtacgatctcggctcactgcaacctccacttcccgggttcaagcaattctcctgcctcagcctcccaagtagctgggattataggcacctgccactgcacttggctaatctttg[155 bp omitted]gcccacagagatgaaatgacttgcccaagttcacagccaagagtggcagtgccaaaatcttcgtccaaatctctgattctgtatcctgaatctgtatatccactcctggctgtctggattaagtgtccatcattggcagggggttgtgagagccgcttgtgatgggcctcgaatgccaacctaggagatttgctttcatcctaagggccagtgaaggttttgaagcaggaatatgccatgattagatctggctatttgtctttaagtgctggataactatccatgtcttttacattcaggtgctgggttgcattcattcaggagtatttcctgagcatcacgtaggttttcaggggctgagtagtcagagatgagttagatgaggtccctgccctttaagatttatgggaaggtagga[131 bp omitted]aaaccccgtctgtactaaaaatacaaaaattagccaggtgtggtggtgggtgcttgtaattccagctactcaggaggctgaggcataagaatcgcttgaacctgggaggcagaggttgcagtgagccaagatcgcgccactgcagtccagcctgggtgacagagcaagactccgtttcaaaaaagaaaaaaaaaaaagaaataaataaaagaaagtgttatgttttctgtaagagggtaggtaacctaatttggaagttgaggggtagaaaagattatttctgggggatggagacagagacttctggcttcctattctgacatccatttttccctttctcctcagtaaaagaaaagaacactggttgtattttatggttgcactatgtccagcagaaaaaggcattcctcagtctccttgcagcaaggtaaagccatctgataaaattttgtccagttggatataagccaaaatgttgcgtgacaattttgggaggacttcctgaaacaggtggacaaaccctttttctactgagtcacctttgtgccacctggaactaacagtgtgacgcgtggaatttaggcagccatattgaaccatgaggacaagagcagtggggatggcggaaccaagagctggaaggtgcctgagtctctggtgaagatgtggagctgctgtaacagccctcaactcctagttctggacttcttttatgttttagtgtaacgctttgggtatttttatttttttaatttattttagagatgaggtctcactatgttgcctaggctggactcaaactcttatgctcaagcagtcctcctgcctcagcttcatgagtagctgaaactatagcactttgggtatttcagccactgtttgaggtttttctagcacctcctggaatatcaagcttaacatgtccaatccttgccccagatattttcctccccaaattttctcaatctcaataaatgtcaccaccatccacctggttgctcaggtcaaaaacctagaaatcattcaagttctctccctttccctcatccccaatatccattccatcagcaacatctgtccattctacctccaagacatatcccagatctcatcacctttgtctgcctctcctaccctcactctcatccagcatcatccctcacctggactctgcaaaagcctactcgtgggtctgtctgcatccctgtctgcctcctccagggccattctccacccagtggccggatcgatttttcaaagaggtaaatcagatcaattcacctttctgcttaaaaccctccgagggctgcccgtaacatgtagaataaaatagagaccccttcccggggacttcaaggtgctatatggcctggccccttgctgaccttacttcactctgggctcgctagccttgctgtccctcaaacatgctgagctcgctcccaccacagggccttttcccttttcttccttctgcctggaatgttcttctccccacctcccaagccccatcttcccagggctgactcctgttcccatttgggtctcaaatcatatcagtaccttctcagagaggccttccctcactgctcatcccttcacctttagaacactttcttttcttttaagagacaaagtcagcccagtgcggtggctcacgcctgtaataccagcacttttgagaggccaaggcgggcagatcacctcaggtcaggagttcaagaccagcctggccaacgtggcgaaaccccgtctctactaaaaaaatacaaaaattagctaggcagtggtagcccgggctactcaggaggctgaggcagaattgcttgaacccaggaggcagagg[133 bp omitted]tggctcactgcagcctcgaactcctgggctcaagccatcctcccacctcagcctcctaagtagctgagattataggctcctcccaccacacctggctaatttttgtgctttttgtggagacacagattctccatgttg[133 bp omitted]ctatgaagatttcactggaattatcagattaatttgcttatttgtttactgtctgtttgtcacccatgactggaatgtatactctaggaaggcagggatataatccaatgggtttactgctgcacccctagtacccagaagagtgcttggcacctgataagtgtctggggaacttgctacatgaattacatgtgtcagatgggatatctgttcgtctttcttctctcttttttctttctctctttctctctctctttctttctctttctttcttttttctttttttgagataaggtctcgctctgtcacccaggctagagtgcagtggtgcaatcatggctcactgcaaccttgaacatgtgggctcaagcgatcctcccacctcaggctaccaaatagctaagactacagaggtgcgtagctatgcccagctaattaaaaaaaaaaaaatttttttttttttttagagatgggggtctcaatatcttgcccaggttggtcttgaactcctaggctcaagcaatccccctgccttggcctcccaaagtgctgggattataggcatgagccattgcagctggcccagacagaatctcatttcagcccgacaactttgtgacatcattattttcatcttaaacacctaggttgatcccagctcaaccacttgccatctgtgtgacctgtgggcaagtgaccttacctttcggagcctcagttgccccatctataaaatgggaatgatgccagtgcctgcctcataaggatgagccccgctcctgaagctcagggagccctctctgcaaggctgttttagtgcaacctccggaaacatgcccatgcatgtgaaaactggcatgcacattctggtgcttttaaaaacatctcgaagcctatccacagatcctggacctcaagactggttcagtgctagccccccattttacagatgtggagaatgaggcttagcgggtcccaggcaagtcagtggcaaaactcaccatctcctgggagccatcaggttcctctggatctgcccccaccaaatttatcccctgctctctgcttgagggtgcacatggggtgagggtgggggtcttttgttttactccctccccctcctgaggagtcagtaaccaacagtgtctgtgcctggaatattaatgtctcagcagcttttgtttggggggttgggggtggtgggggcgggactttctggtcagagaggggctgagctttggggactgaggcactggccctttaaactgtgttgacagccaggagtcgtcatggggatggtgcttggaaaaggggacagggagggtttgggaaagagtggcggagcaggtaatgcgtaagacccaggaatccagcccccaactacctcctctcccaggacccaggagtctaggctcccagcccctcctccatcaggttccaggagtctggaaccccggcttctttccgccttagacccaggaattcagcccccaaccacctcctctctcaggttcccgaaatccagacccctagcccccttctcgatcaggacccaggagtctgggctgtcagcagccccttccttcaaacctaggagtcagagcccccagccctctcctagcttagacacaggagtctgggcctccagccccctcctccttcaggacccaggagccaggggtccagagtacacagctggtggatgtttccacggagactaagcagggtggggggagcgcttcctgggtcctgagtcagcgaatacccaagggagtctcaaggtcatagttccgggaaggtcaccaccaccccctctgtatccgctccccagggggctcctggcatcctgcctccttcccccttcctcccttagggaggtggtacatccctgcgtcctgactgaacccccctcagccccccatcaatggcggagtccgaacatcctcgcacaaagcgtcaattcttccccagctcagccttgtgaaggcgcctgtattcgcaggacctaggcgtcagggtctcagcccctcctccctcagaaacctgcagtggaatcccccgcctccagccccttcctccctcaggacccaggagtctgtatcctcatcccttcctccctcaagacctaggagtgtggactcccagcccccttttccttccggacacaggagttccagccctcggccctctcctctcttaaacccaggggtctaagaccccagcctcctcctccctcaaactcaggagtctaagatcccaggcccctcctccctcagactcaggagtctaagatcccaggcccctcctccctcagactcaggagtctaagaccccaggcccctcctccctcagactcaggagtctaagatcccaggcccctcctccctcagacccaggagtctaagaccccagcccctcctccctcagactcaggagtctaagaccccagcccctcctccctcagactcaggagtctaagaccccagccccctcctccctggacccaggagcctaagacctcagccccctcctccttgagacccaggagtctaagaccctagctccctcctcctttagacccattagtccaggcccccagaccctcctccatcagacccaggagtccaggcccccagcccctcctccatcagatccagcccctcctctcctgaaaacttttgactctaactccccagtcctcaacccctagaagcacagtcctgcctttcctcaatcctctgtcccctcccatctggggacctaggcatcaggtgggggcgtaggggtgagtcagcaacctcacacacaaagtccccgctgtggcccccacattcctgggatattcgggactccctggattccaggcctcaggcccagccagggagtggggagtcccccagaggtcctccctgggtgtggggtacgagaggaattcctgctccgggaagggtgcaggcctgcactgagctccctctgtccgaacctccacgcccagtgccctctattcaccccctcttcccagaagagcccaggctcagcacctgccccttgccccactgggtgcccacggaggagcctgcgtgcctgctccctatgggcctggggtctgcacaggcggaaatcagtgggtgcttccgttctgatgccacaggccattggatgctggcgggtctgactgtctccaggccaccccccacccctcccagagagagaaagctgcctttgtgttctccaagatggggacaggccaggctcgcacgacattaacccagccttaggccccagccctgctgtgtctaaggtcttggaatccactgcagaacctgacccccacccccaggctctggggacacaggcgcctggctcatgggtgggtgggtgggggggtcagtgatagaaacctccaaaacctgttccttggggtgactcacaatggagggagggtccccctattctcaagagtggctggtcagaattttagcaggaaaaagtgagtcaccctgggaaggaaacattatttagggaccaacaactgccccctccacaagacccctcaactcctaatagcctctctattctttctttgtattggatatctgtttcctctcctcctttctgttctacccagtttctggctgcgggtcccatttctgcctgggtgcatccctgggcaggcaacccatccctccctcttgctttctctcctctgcccaccctggatccttctttgggcataaatctcatcttcttctgctatgctcagaagatgaatgaaccaggagagagagaacatgtttttaaaatggcgcaaatgcaccccatctcccccgattcctgctggctgggcaaggtgagagaggaagaagtgactaagagagaaatgtgggaacaacagataccccctaaaatgtggtagccaaggccactgagaaatatccaatggaaaggagagcaggaagggccctccaagaccacatgctacagcctcctaccccatgctttacagaacgggaaagtaaggcccagagagggacaaggactgatgcaaaattatactaaagggtcctgggtaaggcttggacccaagttccttagctcccagctgagagctcttcccatgacaccaagctcagtttctactggtaaaagccacatactatttactttagagaaagtttacagagagggttagggtgccaggaagcagtgacttggaaatcaaacgagggacagggctgtagacctaactcccagaagcaccagagaaaggcttttgcacggggcgggtggtcaccttaagctatattctgatcctgagaattcaaagtctgatgattctaagctgtcaggattctaaatgtcatagatgtcaagatccaggaactccaagacatcaagatttcacgatttttaagacgtcaagatgctagcatgctaacaccatcacggttctagaactttaaaggtgtcaagattctaaagccttctggattctagaatcctgtagatgtcagcattctaaagtaccatcaggttctttatttactggattcattagttccaggattctatgagcctggtgtttagcctaaaaaataaagataaattaaaattgatggaaatgtcactgaggtaccaaagttctcatctgggaaattgtggcatgtctgttgtaaagaaaggaggtaatgatgcaagttctaaagcagtcacagaagactagagaagaaagaaagacagtgagaggacagctttgcccctcatcctggccgaggtgaggatggctctgcctcaaaccctggagtggggaacatgtaaccgcactcaacttgccagaaaccccttcacggtctgagctggcgttccctttcatgtcactgagttcaacatcctcactttacagaaagagaaacagaagcctggagagaggaaggtgtttaccattggctgcgatggcaaatggcaagagccaagatttaagcccaggccgccagccccatgccacctggttataactcctctcaccaatctctgccgaacacccagccctcctgcttctgcctagccaccttccaatcctctgttccttccaaaagtggccttatccaccagggaggggtgacccgtggcaggttcaagacttacacagtgtgagagtgtgtgtgggtgacatttcctgaccttgtccccattctcagggtcacccaacctcgggggtctccagcttctcacagtgtgtgatgagggtatgtggatggctccctggatgtcctggacaggggcttctctgtgagtcaagcctgggtgtgtgaatgggtgagcagggtttggagaggcattcgctgaatccacgtgtgtgcctacacgccaaggtcccccattctcacttccccacacacatgcacacagatgttcccctccagggctctttagaatgccctgcctgactgaattcctcttcaggggcacagagggatagagagagggaggaaggtaggatgggaatgggagatcccgggatggaggctgtaagcgtagagagaggaggcacagcagaaagacagggatggagatagtgggacagagaagggggaaagagacaggtgacagaaagggttagagaaacgagtgacagaaagacaggggacagagacaaggggatggggcagataggggacagagaaaaagggacagaaaaacaagggtgacagcgagacagagacagggaccaagaataggggcagagagggagggcagaaatccgggggaaagagaatagacaggatgatggaggggacagagtgacccaggaaaaggggacagagaccaggggacagaggtaggggacaaagacagaatagatgaggaacaccgaggcaagaagagagggagacagacagaaggagggacaggacttcgagactgagggatagaggacaagggtagggggacgaggagccagacgggggggttcagagacgggcggacagagggacgcagagactggacagaaggacagcgggaccggcctggggagggcggacttgtgtgtgtaggggggtctcgggccctttgtccccgccgggatccagcctgcgcgggtgggggggctgcggcacggcggccgggccccgcgccccctcccccgctcgtcgctcccggctcccggcccgcgctgcgctttgtcccggggagggggcccggcccggccccgcgcgcattgttcggcctctgcggccccgaggctgccgggctgtcaccacagcgcgccccccgccccagcccggccggccgaccccggcccccgaccctacctggccccgccgcggccgcccacagcagcagcagcggccactggaagcgccgggcccggcccatggtgccgccgccgccgccgccgccgctcgctcccggcccggcacctgcaccgcccgcgccgcccgccccgccccccgcgccccgccccctgcccgcccgggggcggggcgccgaggccggggcggggccggggaggggagggggagacggaggagaggcccggagacaatcggggggacggcacggtgggggaacggtgcggggtgcgaaagctggagaggagaggggtgaggagggcgggaaggggtgcgcgggagggcgacagcggcgtgggagcaggtgggggatctcggtgagcgcgggaaatggagggtgttgggtgagggtgctgcgtgcgggcccaggtgctgcgcgcgagggtgcggagttgctggcatgcagggtgcttgcgctgcgcggaggggagggtggcagggtgttgctggaggctgtgcgagggtgggggcgcgggcgtcgtggggtgcggtgtgtgcgaagggagagcgtggccagcgtgacgggggagcgtaagggagggagtgcgacgtgggaaaggtgagtgtgagaggcgtgctgcgggcaggtgggtgtctggagtctagcgagaggctgtgagctgagccaccgggacaggggaggctgcagctggaggtccggagggtccggaggtcgaggcaggtcaaggatctcccagggcagggcgaggctggggctcaggagtggggtggggtcagttccctccctccctctctcctgtcctgacctgaaaaccccgtgtttccgcgtcattctccgggaggggccccctgaaagtgaactaactggaaggaagcctgaatcctgggtcccaggagggagaggctcctgtgaacaccttccaagccctggcgtcccctctcctccctgctgtctccctgccccagcctctctccctctctctgcatgtatttgcctctgcccttcctctctccccatctttgagggtgactcacccctccagacttaggtcccttctccctcctgggagtgggtttccctgagcccacttctgtgacaccctgtagacctgatgcgggatcattacctatgggacccagaaagagtgagaaaccatggaaagaaggcctcgacctctctcatgcccatttgtcaggcaaactgaggtccagaagtgccaattatgaacatctttccttcccccctcccccctccccgcccagacggagtctcgctctgttgcccaggctggagtgcagtggcacgatctcgactcactgcaacctctgcctcccaggttccagtgattctcctgcctcagcctcccgagtagctgagattacaggcgcccgccaccatgcctagctaatttttatatttttagtagagacggagttttgccatgctggccaggctggtcttgaactccttacctcaggtgatccatctgtctggcctcccaaagtgctggattacaggcgtgagccaccatgcctggctgaaaatccttactttttattccgactaaaaaattttacatccagtcccacaagggacttcagcttcacacaccctttctgtcctcagtacccagctcccagtatcctttctgacctcaaaaccatagctaccatcaacccttgtgtcccaggaccatggctcccagtgtcttctctgtcctcagggtccaagctcccatcaactcctgtgtcctcaggaccacggctcccagcatcctctctgtccttcaggtccaagctcccatcaacccctgtgaagcaggaccatggctcccagcatcctctctgtcctcagggtccaagctcctatcaactcctgtgtccccaggacgatggctccagcaatcctctctgtcctgagagcccaagcttctaactgcccctgtgtccccagatccatagccctgagcaacttccttctttttcagtcctcagcttcccagcttctgtagacttgggaagagatagtctctaatcctctttccagggctcacattctgtgacttttgctagatgggagaggaatgtttgatctgcctttggaatactggtccaaggggtaactagtagttgccttttcccgcaggagccaataggcccgctcactctgtgctctgacagatgtctcctgctccagctgaaggggaaccttgggagatgttggtttggttctcacctgtcatccttaagtcccaccattccatgtgaagacatcacaagagtagtggtcctgacgggcgcgttggctcacacctgtaatcccagcactttgggaggccaaggtgggccgatcacttgaggtcaggagtttgagaccagcctgaccaaccggccaacatggtgaaacaccatctttaccaaaaaaaaaaaaaaaaattagcaaggcgtggtggcacgtgcctgtaatcccagctggtcggaaggctgaggcatgagaatcccctgaacttgggaggcagaggttgcagtgagctaagatcatgccactgcactccagcctgggtgacagaatgagactcagtctaaataataataataataataataataataataataataataataaatagaatagtggtcctgtccccatcctacttcagggtaccctgtccattagggatttagtgcaagtgacagcaagtgcaacccaactggtttgagagaaagagaactggttcacacataacaaaaagtccttctatggctggctttggcgaggtctgtcaatctctgtcctaaggatgcatggctcccctcctgtagcaagatggctggcagatacccctggggccagattcatatttggggtgattaagattctgcaagagagagacaacctttatttcacacagcttttcaattgttgcctgtccctggtgagactcggagacctagctcttgcctggtttctaaactttcaataacaccgtttttgcttaagtcagcacaaacagattttatttcttgcaagcaaagattcctgaacaacaacttcagagccgttaacaatgaggtcctgatcacaagctatggtataggacgtgagaaatttgtccctagcctcaatatctgctggagggcatcatggaataagtatttctatcctctgatccccactgtagggcatcatgggatatataatcctaaccttcaatctctgccatagagtttcataggcaatgcagtcctagcctcaatatgttgtagggaattatgggaaaggtgaaattatcctcaattataatacagagcatctcagaaaatgtcgttttagcctcatctctgctgtagggcatcatgggagatatacttctggcccaatttttgttgtaagttgccatagaagatgcagtctttccttccttcccttttttcttttctttctttctttctttttttttttttttattatgtagagacagggtctctcgctatgttgcccaggctggtcctgaactcctgggctcaagcagttctcctgccttggcctcccaaagtgctgggattacaggcaagagccattgcacccagtcccttctctcctttctttcttcatcacctgccatattccaggcactaggaataaatcatcaagtaaataaacggccttaccctccctggcaattataatggggaaagttagctaaaaacaaacaaaaattactgttccatttaaccatcgctgaataacaaaataccccagaacgtagtggtgtgaaacaacaaccttttaattttatgattctgtgagtcaggaattggagcaggattggtgtgtatctgcttcatgatgaactggagccaaaaatgaactagctggaacagctggagatggaggggaggggcatcaagggccatatatctaaggctggtggttggtgttgtgggttttgaatagtgtcctccaagtaaaatatatgttgaagttctagcccctggtatctgtacatgtgaccttatttggaaataaaatctttgcaaatgtaattcacttttttgtttgtttgtttgtttgctcgagactgagtctcgctctgtcacccaggctggagtgcagtggcatgatctcggctcactgtaaccttcacctcctgggttcaagcgattctcctgcctcagcctcccaagtagctgggattataggcacgtgtcaccatgcccagctaatttttgtattttcagtagggacggggtttcaccatgttggccaggctggtctcgaactcctgacctcaaatgatctgccacctcagcctcccaaagtgctgggattataggcatggggcactgcatcctgcccagatgtgattaacttctaacccctggtatctttgcatgtgactttatttggaaataaggtgggtttttttcttgtttttttttttttttttgagacagtttcactttgtcgctcaggctggagttcagttgcataatctcagctcactgaaacctctgcctccgaggctcaagcgatcctcccgcctcagtctcccgagtcactgggactacgggcaagcgccaccacacccggctaattgttgcagtttttgtagagatggggttttgccatgttgcccaggcggtctccaattgccaccctcaagcaattcatccgcctcggcctcccagagtgctggaattataggtgtgagccatggcgcccggccagaaagtctttgcagatttagttgaattaatgactaaatgtttccatgctgagttagagtgggctctaaatccaatgattgatatggggttataaggagagatatttggagacatagccacagtcccagggaaggtggacattggaagacagaggtagggattagagtgatgcagctacaagccaaggaatggcaaagattgctggcagtccctcagaagcaaaggagaggcaaggaagggttcttcccctgagacttttttttttttttttgagacggagtctcactgctgtcagcctcagctggagtgcaatggcgcgatctcggctcactgcaacctctgcctcccaggttccagcaattctcctgcctcagcctcccgagtaactgagattacaggcacccgccaccatgcctggctagtttttgcatttttagtaga[143 bp omitted]agcgtggctcttcccgtgagacttcaacaccttggttttggacatttagcattcagaactgtgagagaacaagtttctagtgtgtgtgtgtgtgtgtgtgtgtgtgtgtgtgtgtgtgtgtgtgtgtatgtgttttagacagaggctcattctgttgcccaggctggagtgcagtggttcaatctcggctcactgcaaactccgcttctcagattcaagtgattcttatgcctcagcctcccaagtagctggaattacagaggagcgccatcacagccggctattttttttttttttttttgtacttttagtagagacagggtttcactgtgttggccaggctggtctcaaattcctggcctcaagtgatatgcctgccttggcctcccaaagtgctgggattacaggtgtaagccaccacacctggcctaagtttctgtgtgtgtgtgtgtgtgttttgttttgttttttttttttttttgagtggagtctcgctctgttgcccaggctggagtgcagtggcatgatctcgactcactgcaagctccgcctcccgggttcacgccattctcctgcctcagcctcccgagtagctgggactacaggcacccaccac[138 bp omitted]cccggccaagtttctgtggttttaagccaccttgcttgtaagatttgtgtgtgtgtgtttttaattttttatttttaagtattatgaatacataatagtggtgtatatttacaggacatatgtaatatggttttgggttttagtgttttttttttggagacagagtctggctctgttgcccaggctggagtacagtggtgggatcatggctcactgcagccttgacctcccgggctcaagggatcctcctgcctcagcctcccatgtaactaggaccacaggcatgccccaccacatccagccaatttttttttatttttagtggagatgaggtctcactgtgttgcccaggctgatcttgaactcctgagctcaagagatcttcctttctcaccctcccaaagtgctaggactacaggcatgagccactgtgcctgtccttccatgatgttttgatataggcacacaatgtgttagtttataaagtttgtaataatttatcacaggcagccctaggaaactaatatagccaagtttcctgtttcttctctatatcacatctgctggggctacatgtccaaggtggcttcttcacccacttgtctggtgcctgggctgagatggctgaaacatctggggctctatctccacatggcatttatacatgagtagcttgggcttcctcacagcatggtggtctcagggcagtagtacttttacatggcaaccagcttccccagagtgagcgttctaagattcagaaagtgaaaaatgaaagtttcttaaaacttggttccagaacatagcacagcaaaacttccaccacattctactggtcaaagcagtcacagagtcactcatattcaagaggcagaagtacagacctcacttctttaagccactacagtgacaggtggtgatatgtcattagagaaagccctaaacaagaaccttgtccctcacctgcccccaaataccatggaagatgtctttttttttttttttttttttttggggatagtctcactgtgtcatgcagtggtgtgatcttggctcactacaacctcctcctcctgggttcaagcgattctcctgcctcagccttccgagtagctggagttacaggcacccaccaccttacccggttaatttttgtaattttagtagagacggggtttt[136 bp omitted]atttgatggggaatgtaatttttgtctccatgggttgccttagcaaatgatgagaagaacatgaatttttcaatattgtgctcctagagtgccattgaaatggtagttctgtctctttttctgacagtcctgaggcatcccgggaaatagagcccagcctttatccccggtccccagcacatcaggggaagtgcactcctgtccttattcctcactgcagtgcatgcagggagttctggccatcaggttatcttctatccgtctcctttcccaaagcatgctgggaaatgtggggatgtctccttagaacaacaaaatagttgcaacctttgaagtttaggagaagactagaaggttagtgttcagtgtgtgatctggaagcttgcatttgtaagaattaaagaaagaggaggccaggcacggtggctcatgcctgtaatcctagcactttgggaggccaaggtgggcagatcacctgaggttgggagtttgagaccagcctgaacaacatggagaaaccctgtctctactaaaaatacaaaattagccgggtgtggtggtgcatgcctgtaatcccagctacttgggaggctgaggcaggagaatcccttgaactaggaggtggaggttgtggtgagctgagattgtgtcattgcactccagcctgggcaacaagagtgaaactccatctcaaaaaaagaaaagaaaagaaaagaaaaaggaaaaggaaagaaacatgaaatgtggcttgacggtgaaggacaggtttattttagagaaaaccaacctgaggggggcttttggctgagttaggttagagagcccttttttttttttttttttacagactaaggatatttaagagttttggaagggggtgcttatctaggttcggaatgttttcatgtgaggaaaagtttattgtggggttggaaagtctctggtcggaagggaggctatctgggggttggcatgtttctggtcagagaggggtttatcttagggttggaatgtttctggttatgctgatggtagccattaggctgatgttttggggctggatttagctgatttttttttgagacagagtcttgctctgtcacccaggctggagtgcagtggtgcaatctcggctcactgcaagctccacctcccggattgacgccattctcctgcctcagcctcccgaatagctgggactacaggcacccgccaccacgtccggatttagccgatttttaatcaagaggaactaagaatggtggtgtttgttcaagatggcagtgctcctgctctgtcagcatttggagtccagaaatagatgtggaggcagcccccaggaggacttccaacctaggcaggggcctcaaacatgacccctgattccaggagcctgtgaaaaggtgtcccccaccatttatcctcccaaagatagacactacaaagaagggcatacctggccttgtccactggtacaaaatctttatgtaagtataaaataaataatatgaatattaattaataacaacaacacaacagcggcaacaatattaataataacaagagctctcccattggcccacggccttcctccagcttttctcttctgcttcacacaactttgtgagatagctgttttcatagctgggaaaactgaggcccagagaggtcggcacactggcctgaggtcacacagcaagtctgtagggctgggagccgagggaagggcaaaggggtcccccggatccagccagggcagagagggggatttcaggtttaggtccagaggagagtgcctccccacagtctggcagtcattagcagggtgatggtgaggctgagatgggcagggccaggctgaggagcagccccactgcggtactggacatccaggtctgggtggttacagccacttttagtacagcaggagacatcaatgtggttcatgctgaaggcgtcacccaggtgggcatgttggcacattgaggcggttgcacagcctcttaccatatagctttggtttttcggttctgaggaaagagaagacggagtgagacttccagctcctgggcccaggactggaattctccagtaggtgacctgccaccttgcagtgggtgccaccttcactaccacctagagaaagcagcagttctcagggccaggtgtggtggctcatgcctgtaatctcaacaccttgggaagccaaggagagaggatagcttgagcccaggagttccagaccagcctggacaacatagcaaaactctgtttctacaaacataaaaaagaaaaaaacagctgtagtcccagctacttgggaggctgagatgagaggatcacttgagctcaggagatggaggctgtggtgagttatgatcacgccactgcactccagcctgggtaacagagtgagaccctgtttcaaaaaacaaataaaaagaaagaaaggaaggaagggagggagggagggagggaagaaggaagggaggaagggaagaagggaaagaaaagaaagaaagagagagagagggaggaaggaaggaaggagaagggaaagaaggaaggaagggaggaaggaaggaagaaagaaagaaagaaagggaaagagagacagagaaagaaaaggaaagaaaaaaaaagaaagaaaggaagcgagcagcggttcttaaagtgtggctcagggaccccagagaccctttcaggagatctgtgatttcacatggctttttcactctcataagtgtacaatgggcttttccaaaaactccaggacatgtgatattgcaagagactgaaagcagaagcttccatgaggacccagctgtcttctattaagctggacattaaagagatgtgcaacacagcaaaataatgccagttttctcattacgctttttttttgtttttttttttgagatggagtctcactctgtcacccaggctggagtgcagtggcacgatctcggctcactgcaacctctgcctcccgggttcaagcaattcttctgcctcagcctcccaagtagctgggactacaggcgcgaccaccatgcccagctaatttttgtatttctagtagagacggggtttcaccatattggccaggctggtctcgaactcctgaccttgtgatctgcccgccttggcctcccaaagtgctggtattacaggcgtgagccaccgcgcctggctggttttttttttgttgtttctttgtttgtttttttaagacagggtctcgctctgttgcccaggccgcagtgcagtggtgcaatctccgttcactgcaacctccacctcccaggctcaagtgaccctcccacctcagcctcccaagcagctgggactacaggcatgcaccaccatgcccagctaacttttgtattttctgtagagacaggatcttgctatgttgcccaggctggtctcaaatccctaggcttaagtgacccgcccaccttggcctcccaaagtattgggattataggcatgagccaccatgcctggctatcattacattttttctttggaaactatacttatttttcattaaaatgttatttatcttaatgtgtaatgagtttttattgttataagatgaattcata[131 bp omitted]aaccccgtctctactaaaattacaaaaataagctgggcatggtggctcatgcctgtaatcccagctatgcaggaagctgaggcaggaggattgcttgaacccaggagggggaggttgcagtgagctgagaccatgccactgcactctagcctggcgacagagcaagactccatttcaaaaaaaaaaaaaaaagatttctcagttttaattttaatttaattttattttattttattttttgggacggagtttcactcttgttgcccaggctggagtgcaatggcacaatcttggctcaccgcaacctctgcctcccaggttcaagtgattctcctgcctcagcctcccgagtagctgggattataggcatgtgccaccatgcccgactaatttgtatttttagtagagatggggtttcaccatgttggtcaggctggtcttgaactcccgacctcaggtgatctacccacctcggcctcccaaagtgctaggattacaggcgtgagccaccactcctggttctcagttttaattttaatgtggcatttatctatagaaatcactgatataaacaataaagagtttttttttttttttgagacaaagtctccctctgtcatccaggctggagtgcagtggggtgatccccactcactgcaacctcctcctcctgggttcaagtgattctcgtgcctcagccccctgagtagctggggttataggtgcacgccaccacacccagctaatttttgtaattttttgtagagacagggtttcaccatggtggccaggcttgctctcatactcctgacctcaagtggttctcctcctcaccctcccaaggtgttgcaattacaggcgtgagccaccacacctggccaaaaataatttttaaaagcatgaagaagttgagaccaaaaagtttgagaaccactggaatacagagacctttccaggacaccacaggatgaaagcccaagatgtcttcagcaaatccccacaacccacgagaaatccaccaaagaattccatttttctttttgtagagatgggggtcttgctatgttgcccaggctggtctcaaactcctggcctcaagagatcctccggcctcagcctcccaaagtgctgagagtacaagcttcagccaccgcacccagccggaattccacttttccatggcaaaaatgtccacatcctgatggacaagtcctaattccttacaataatattcacccacctgaaggaaatcccaccttttccacagggagacccaccacagttaactccagcttaactggaagtcaatctcttgcggaactctccacccccaataagtgttccctcccagcctcggagagggcctcaccgtgagtgccggtggctaccagacattgattcatggggcctcggcagtcaatgaggaaagtctcttcagaggagcatccatgggtgctgttccccttgcagctgtaacactggcggccattctgcggcagattttcaagctccaggacttaggagaagaccagagacacagagaccaagaaaattagtgcttggatctccacttccttgaatgacctccccaggacttccactccgagccagagatgtcatggagccaccttgtggtcaggcgtctgaatggcatttggagggggatggttttcgagggcttgagagaaaccccaactttcaactccccatgagtcccatttctggccaggcaccgtgctgggtgctgggtaaaactatgtaagatgaaactgtccttgctctcacaaaagttacaacttatttatttatttttgatacagggtctcagtttgttgcccaggctggagtgcagtggcgcaattgtagctcactgcagcctcgaccaccccggctcaagagattcttccacatcagcctcctgagtagctgggactacaggcgtgcaccaccatgcctagccaatttttctgttttttgtagagatggggttttgacacattactcaggctggtctcaaactcctgggatcaagcaatctgcctgcctcagcctcccaatgttctcggagtacaggtgtgagccactgtacctggccagaacttacaagttattactattattattactaaaaaattttttttgagacggagtcttgctatgttgcctaggcttgtctcaaactcctggcctcaggcgaccctcccgcctccgcctccaaaagtgctgggattacaggtgtgagccactgtgcccagccagaatttacaatttagagctacactacccaatctggtagccactggccacatgtggttgtttacatttaaataaattaatattaaatcgaatcttaaaattcagttcacatttcaagtgctcactgaccacatacagtggtggctgtaatattggacaggacagatagggaacatttctatctgttgacagtgctgggtaatagagacagggatctagattacactggaggggagggacagtgaaagcatccctgaagatgatacattaaagctgaggcctaatggatgagaagttgccagcagggtgaactcttggggaagatgtgttctaagggaggatattcatctgcaagggccatgagaccaga[133 bp omitted]cgccactgccctccagcctggctgacagagcgagactccatctaaaaaaagaaagaaaggaagaaagaaagaaactaaatgaaggccaggtgcagcggctcatgcctgtaatcccagcactttgggaggtcaaggcagaaggattgcttgagcctgggagtttgataccagccccggcaacatagtgag[137 bp omitted]cagtgaaaccctgtctctactaaaaatacaaaaattagccaggcatggtggtgggtgcctgtagtcccagccactcgggaggctgaggcaggggaatggcgtgaacccgggaggcggagcttgcagtgagccaagatcgcgccactgcactccagcctgggcaacagcgcaagactccatctcagaaaaaaaaaaaaaatgtagctgggtgcaatgatgcgcatctgtagtcccagctacttgggaagctgaggtgggaggatcactggagcccaggagtttgaggtggcagtgagccgtgattgtgccactgcaccccagcctgggtggcagagcaagaccctatgtctaaagaaaacacaaaaccccaaaaacgaatctaaacaaagactgtgaggcagacaggtgccagattacataggccaacagaataaggtctttggatcttattctaagaggaaggggaagtcattgaagtgcctgagaaaggagggtgacatgatctgatttacattaaaaaataaaaaattggtggtgcatggtggctcatgcctgtaatcctaacactttgggaggccaagcccaggagttcaagaccagcctgggcaacaaagcaagaccccatctctaccaaaaatacaaaattagctgggtacggtggcatgcacctgtagtcgcagctactccagtagcttaggtgggaagaattcctgagcccaggagtttgaggctgcagtgagccatgatcatgccagtgcactccagcctgggtgacagagcgagaccctgtcccccccataccccccaaaaaatcactcgctgctgggttgagccttggctgtagggtggcaggagtggaagcagggagaccagagaggaggtcattgcaacaacctgggcaagaagtcagcgtggctcagcccaggtggtggcagtggagcaggggaggagtgggaaaatttgagagagacaaaagagacaggaagcacaggtcttggcgagggctgatagtatcattgaatccttacgaagttcttctttgaagaaaggcctggctgggtgcagtggctcatgcctgttaccccagcactttgtgaggctgaggcagacagatcacttgaggtcaggagttcgagaccagcctggccaacatggtgaaacccccatctctactaaaaatagaaaaattagccaggggtgatggtgggcacctgtaatcccagctactcaggaggctgaagcaggagaatcgcttgaactcgtgaggcgaagtttacagtgagcggagatcacgccattgcactccagcctgggcaacagagtgagactccgtctcaaaaaaaaaaaaaaaaaaaaaaaggcctgatactcccatttttcagaaaagcaaacagaggcccagagaggacttgattgccagagagtgactgcgcagctgtctgcctgagtgcatgcccctgcccgaccccaggccttgcctgtgtctcccgttccttacttgggccctcgttgcatttggtggtgttgcagcatttcaggaagtggaaggtgtcgttgttgtggaaaccattggagcccgggcagccgggaaggtagccacagccacggaggtggcggtcatcctttggacgccctatgggggccaggggacagaggtcagatgtcagattgtgaatgagggactaagatgggatttgcccgaaatagcaggcattcaaccattctctacttcacccttcatcataagaccctcattttatctagaacagtcatagatcttgtcgaaaactacatattccagcctctccaggtagtcatgtgatgaagttcggactaatgtgatataaatagaagtgctttatgggacttccagaaaggagaacccttacaaaaggaggagtgcccccttttttgtcccttctttccttcttcctccttcctggaacttagatgtgagacccggagctctggcagccattttagactatgaggcattttgagaatggaagtaatgtgtaagaaacaagagggtggccgggcgtggtggctcacgcttgtaatcccagcactttgggaggttgaggcgggtggatcacaaggtcaggagtttgagaccagcctgaccaacatggtgaaaccccatctctactaaaaatacaaaaattagcaaggcgtggtgatgcacacctgtaatcccagctattcaggaggctgaggcaggagaatcacttgaacctgggaggcggaggttgcagccagccaagatcatgccattgcactccagcctgggtgacagagagcaagactctgtctcaaaaaataaataaataaataaataaaaagaaatgagaaggcatctgggttcctggtgactctggacctgtccttgtggccctggacttcctatcactggacctcttgtgtatgagagaacttagtcccttgctgacatccctgttactttggggttgtttgttaagtgcagtcttagggaggagcagagcagggaggaggagttgccagcaggttggggctcaccttcttcaccttcctggatccagtgggtcaccacatccaggcactgttcttcagggctgcggcactgcaggctctggtgccggcccctctcacagctcatgtctgatgagccacaggaaatgcattcgaggtaacggcttcgggaataggtgacagcccggcctgtttggaagagggggaggggagtgagactccatggggacagtcctggagccccagctctgcaaggactcactcaaaatcaattcctccttatcccaccctgcagccagtcattgagccctgcctattctgcctgctgaatctttctagaatccaccccctcctttccagccccatggaccagtccagctcagacctccttcaactccagctacctccctagcctctgggtttccattcttgtcaccccctactcaccccagtgcagcatctccacatggccctagaaacatttctttcctttttttttttttttttcccgagacagagtctcactccgtcacccaggctggaacgcagtggcaccatcttggctcactgcaacctccactccccgggttcaagtgattctcctgcctcagcctcccgaatagctgggactacaggcgtgcaccatcacgctgggctaatttttgtatttttagtagagacagggtttcaccatgttggccaggctggtctcgaactcctaacctcaagtgatctacatgccttggcctcccaaagtgctgggattacaggcatgagccactgcactcgggcccttagaaggatatttctaatactcatatctgaccctgtctctcctctgctcaagactcttccatagctccctactgccctgaaaataaattccaagatcctcagcatgggattcaaagcctatcaaatactggggcctgagcacctctcctgcctcgtctccctccactacaccctgagactctgctccacactgacttcccacagtctgcgacgacacatgttccctggcatccaggcctttgcatatgccgttgtttctgtctagaacacctttcctttgctctctgccttccctaactcctactcattcttcaggtgtcagctctaatttcacctcctctaggaagcccttcctgatccaccaggctcccacacacccctgtactcccccatcccactctgggtggtcactgtctggtgacaggtatgtctcctctactggactgtgagcccccaggagggcagggccaggggctgtcttgatcactactgtgtcccaacaccacctggcacatggccagggacagataagatattcaatgcatatttgttaaatgaatgaatgaatgagcaattacttaaaacccttctattgttccctgtggtagcctgtctccaaaatggcccccaataatctctgctccctggtattcatgcccttaaagaatagggctggctgggtgcagcagctcatgcctgtaatcccagcattttgggaggccgaggtgggaggattgcttgagtctgggagtttgagactagtctgggcaacatagcaagactctgtctttaaattaaaaaaaaaaaagaagaagaaaagaataaggatgccctatgtagtcaactggatattatggaaatgatggtgtatgccttctgtggctagatcatagaacacatgcctggctctctcacttggatcactttttctggggcaagcagcagccatgttgtgaggacactcaagtagcaccatgggaaagttcacgtggcagaactgaggcctgtgccaaagccatgggaggggagcattcatgtgagtgaagctaccttaggagccttcagatgactgcagccccagctgacatctcgactgcaggctcatgaaggatcctgagccagaaccacctagctaagccactccagggtttttgaccttcagaaactttgtgaaataacacatgcttattttattgctgcaatctgtaatgcagcaatagataatagataagcaatagataatacactacctaattgtcccagggatcaaagactcacttgactgattcctgatcacttcgccttttgcacgaaccttgtggtgttggccaactggatccgttacttttccctggaaacaccagagtcattcctctacccagcccttggctcacaccatttcccatgcttggcatgccctccccgtcctgacccaagacacatctaagctgagtccaggccaagtcttaaaaaagtgagaggaccatgtcagccaaggttctcaactggcaggccgctagctgtaattaggcgaatcatttacatccaaagcccaatcgtccccctcaaagaaaaataactacaaggccacccacgtcttctcacacaaacttccatgaaaatgaaaacacaaattctcaccattgccaacatagctgttcatacctagaacaccttttccttgagccctactttctctaactcctattcattcttcagctgtcatcttcaatttcacctcctctaggaagccctccctgacccatcagcctggaacgggtacctgctctgagctcccactgccccttgaattccccatttctagttctgcccactctgggtggtcactcatgggtctctggtgtgaactcttgtaaatgccaatgatccttagggctattttcctttttcttttcttttctttttttttttttttgagatagggtcttgctctgtcccaaggctggagtgcagtggctcactgccacctcgacctccctgagctcaggtgattctcccatctcagcctactgagtagctgagactacaggcatgtgccagttcacctggctgattcctgtatttttgtagagacaaggtcttgctatgttacccaggctagtctcgaactcctggactcaaatgatcctgccgcttcggcctcctaaagtgctgggattacagacgtgagtaccgcacctggccagggctctgttttaagccctttttatctctcacagtatagactctctcatggggtaaatattgacatgacttcatttccatctatctgctcatcactcacaaatctctctctagtctagacttctctctgagctccagacacgcaactgtctcttcgaggccccatggctatacctcaaacacctgtcctaaacaaaactccccatcttctcccacaactgctctttttcttgaagtccacgcgtccaaggcggccccatccagtccccggggcagaaacctggcagacccccttatcttccacatctgtgcatcaaccgacatgcttctactgttctgtcttctagctccttaatccttttgctctgctgtttctgacctctatcaagcataactgccgagttcttcatttgagtcactgttctatattttctgttggactcttttaaaaaatggattccaggtgctaaaacatatcctttcttctgttttcctgaatatatcgattgtagcaattttcatgtttcctgtcctataatccaatatctgagttgctacaattctgtttctacagttggatttttctcttggtttctggtcaattggtcccttttattttcttcaggataccttgtaaggttttttgttactgttttttattttttgttttttgttttgttttgttttgagacagagtcttgcgttttgttttgttttgttttgttttgttttgagacagagtcttgccctctcgctcaggctggagtgcaatggtgtgatctcggctcactgcaacctccacctccctggttcaagcaattctcctgcctcagtctcccaagtagctggtattacaggtgtgtgccaccatacccggctaattttttttttttttgtatctttagtagagaaggggttt[132 bp omitted]tgctatgttgtccaggctggtgtgcagtggctattcataggcataatcctgctactgatcatcacaggagttttgacctgctccatttctgacctgggctgcttcaacccctccttagacaacctggtggtcccctgctcctgggagatcaccatattgatgccaaacttagtgcagacacccggttgatatagcacactacagcccagaactctcaggctcaagaaatccttccaagtagttgggactacagacgcatgccaccatgcctagctatcttgtaaattttgatcagacgccagacattctagataaaaatctgtcaagggcctaaacgatgttttcttcttccacagagagtcaggttttcattcctgtcaaggactggacctaggcttgtttagggctggtctatttcactttggcccttacccctggggtggtcttagggggaaagcctgagatgcttaccaaggcctcttcagcttggcaacctgtgtccccagcatcacatgtctgctggaagccttgttcgcttttgtagcttcccagttgctatttttctcttccaagtttcttggactctcaccctgtgcatgtagagcttgccaatgacttgagggagatttgtttgcaggttgggaactcccttttctgtggtcccatccattccaggattttaactctcatcttccagacattctggcagccccaaactccaacctccgtcttctcagtctagcgactctctttccgtctgggctctatttcccttccacagcagcagattggcaagtgcgctccgggaaaaagccaggttgtctgtggaacccaaattctacacttctgttatttcagagattgtagcgcctcaagtttctcctttctttcttttttcttttttttttttttgaaatggagtctcgcgctgtcgcccaggctggagtgcagtcgtgtgatcttggctcactgtaacctctacctcccgggttcaagcaattcttgtgcctcagccacccaagtagctgggaccacaggcatgtgccaccacgcctggctaacttttgtatttttagtagagacggggtttcgccatgttgcccaggctggtcttgaactcatgagctcgagcaattcacctgtcttggcctcccaaagtgctgggattacaggcatgaaccactttgcccagccaagtttctcctttcatttgctgctctccagtgacttccaataattgtttattatttgtccagcatttgcaactgtcattggcagaagggttggtctgatacaagtgactccatcatgaccagaattgcaggtcccctcccacatctaatccaccactaaggcctgcttcttaatagctcttgttcggctttggttgagacagggttttgctctgccgcctaggctggagtgcagtggcgtgat[131 bp omitted]cacctgacaccctagtcctgctgccctcttctccacctggacaacctcgcccacccccaagttggtttcccctcatctactcttgcttcctttcagtctatcttctgtcctgaggtcagaataatttgttaaaaatataaatgggggccgggcgcggtggctcacgtctgtaatcccagcactttgggaggccgaggtgggtggatcacgaggtcaagagttcgagaccagcctggccaacatggtgaaaccccatctctactaaaaattcaaaaaaattagccgggcatggtggcgggtgcctgtaatctcagtttcttgggaggctgaggcaggagaatcacttgaacctaggaggcggaggttgcagtgagctgagatcgcaccattgcactccagcctgggcaaaaagagcgaaactccatctcaaaaataaataaataaataattgcgatcatgacattcgctgtttaaaatcttctgtgatgccccagtgctcccaggacaatgtctagaaacccctgtgtaacatgcccctgccaagctttccagctcatctcgccccactgtactgtttcctttgtccagccacactgcttttggccacctttgtatctgctgctccctctgctggaaaaccctttccactgtttttttttttttttgcaggatctcgctctgtcacccaggctggggtacagtggtgcgatcatagcttactgcagcctccaccacctgggctatagtgatcctcccgcctcaacctcccaaggagctgggatcacaggcatgtaccatcacatctggctaattttttaatttttttgtagagtcatgttgcctaggctggtctgaaacaatcctcccacctgggcctcccaaagtgttgggattacaggcgtgagccactgcacccagcctccattagctgtttaatagtctgattcctactcatccttcaagatccagcttagctgttgcttcccctaggaaaccttccctgacctgagtcaggtatctcctctagggtcccacagctcctactcttccctcatcccagccctgacccctctgcctgtgtttcccccttcatagcccagacaaatctattaggttggtgcaaaagtaattgtggtttctgccattgcttttaatggcaaaagccacaattacttttgcattaacctaataatcagtcactgtctggtgatggatgggtctgtcacccctacacacacacacacacacacacacacacacacacacacacacacacacacacaggactgtgagtcccatggagtcaggcagggcacaaggctgtcttggtccctgctgtgttcccagcatcatgtaagtactgagtgcagtttaaccaactatgcaagttgccacaagcagggtacaatggcattagaaatggggatgaggccgggcacggtggctcacgtctgtaatcccagcactttgggaggctgaggcgggcagatcacctgaggtcaggagttcaagatcagcttgaccaacatggagaaacctcatctctactaaaaatacaaaattagctgggcgtggtggcgcatgcctgtaatcccagctacttgggaggctgaggcagaagaatcgctcgagcctaggaggcggaggttgcagagagccgagatcgtggcattgcactccagcctgggcaagaagagtgaaactccatctcaaacgaacaaacaaacaaaaaaaaaaaacaaaaacaaaaggaaacaaaaaaaaaaagaaagaaaaaagaaaagaaaaagggatgatataggtatctcagttattagattcctgaattgatagctgctgctctaagctcctggtggatccctgaccactgccaactctctccccaggacccttcatgtccctgtgacccatcatggaaaggggcaacaccaggcccagcagcggactccaggagtttgtcccagcactgaccaatattgttaaatattttcgctatcatctctgattgaatgcactacttagacccaagtattggtgctttccttaagcacatctcaccgagacgggaagcccacatcctctcgtcacttcctcaaaacaaacatctgatttggccccaccagcggattagtgtttgaggtcaggatggatgaaaaccaggcagaatcaggatgaatgaagaacaaagaaaacccagtgcaaacgcagcactctgctcactgatgtcaccaaccatgactagactggccttaccctatttccttcctcaccaggtccagaaagaggaatctctttcacggatggatccatgcaccatggacccattccttccccacccttcctctcctgtgggaatttaggaaaatttgaccttttctaagtctttttcttaaaatgatcagagcctgaagccatgaaattcgacaaaggggcttatggttgttgcccaggctggtcttaaactcttgggctcaagcggttctcccgccttggtctcccaaagtgcttggattacaggcatgagccaccacacccagcctattatggacatttcctcacatttgttttttcactgcccaagtcagagaccatctattgcagaggattctcccagcctactgcggcccatttaatcttcccctctttcgacttcccttaagaacgtcaagtctttgcttgaatcctggcccctcagtatctattgcttggaccatctcccgtcccaatggattgggcaggaccatctcctgcccagtcagatggacaaacatcactgagacatctcatctatgtctcatgcatgcgtgtgagcttgttaagggcagagttgcaagttatacataacaaccatacatacaaacatgcaggatggggattgggttaaggatgaaagtaattgtgtcgttggggtggggatttgggtagtctgagataaggatggggttgatttggggatggggttggaactgtgcttggaacagggctgggtttgagttgggaacagtgttagggtaacatgaagttgggcataggattggaggtgaagttgagttggggttggatatggggtcaagaatgagttggggatggagctgagctagagatgggttgggttggggttgggacttggataaggcatggagttggggttcagctgatgtaaagttaagaataggattgggatgatgatgaggttgagctggggatggcttggggttggggatggcaagggctgccctactcaccagagttgccctggttgcacaagtctaacccacacacaacctcggtaaggctggtgatcttcaagccagtccgatagctcagggtcctgttggtcttctctgagtgggtacagcttttctccaccagctccagctcttctccttctgcaaggaggggatcttcattaccccagaggctcctctcagctcaaccagcctctgacactcctggtctcaaggtcatccactcccagggctgatctctgctaggcctcttctgttatttgagtcgaactctgtctttttctagagttaaccttgcctccacccccaccccaacaaggagcctgctctattttatttcaattaattaattaattaatttttttttccgggagacagggtcttgctctgtcacccaggctggagtggtgcaatcatagctcactggagccttgacctcccaggctcaagcagtcctgcttcggcctcccgagtagctggaaccacaggcttacatcaccacaccctgctaatttttaaattttttatacagatggcatctcactatgttgcccaggctgatctcaaactcctggcctcaagtgatcctcccaccttggcctcccaaagtgctggaattacaggtgtgagccactgtgtcccactcctgctcttgtagtgacagcactacaactgggactttctggatccatctatccctcccccacaccctcagcttagtgatctcagtactgagatgcctcaaatgtaactttattttatttatttatttattagaaacagggtctctgttgtcccagctggggcaatcatagctcaccacaacctcgaacttctgggctcaaggaatccttctgccttagcctcctgagtagctaggggtacaaatgtgagctactgtgcttggcttcatatactgttgtttcatgtgttcttaaagcttataaaaaacgtatcatattctgcaacatttttttccctctcaaccttaggtttctgagatgtgtccacattggtatctgcagctctatttccttctttaagctgcagtagagcgctccattatgtaattattaccacagtgtttctcttctgctgctgacttgctgactgacataaagtcgtttccattttcttcttttctttctttctccccttccttcctccctcctccctccctccctccctgcctctctccgtccctccctcccttcctctctctctttctctctctctctcttcctttcctttctttctttctttcttgagatggagttttgctcttgtcgcccaggctggagtgcaatggcacaatctcagctcactgcaacctccgcctcctgggttcaaacaattctcctgtctcagcctcccgagtagctgggataactggtgcctgccaccaagcccggctaatttttgtattttttagtagagacagggtttcaccatgttggccaggctggtcctgaactcctgacctcaggtaatccacctgcctcagcctcccaaagtgctgggattacaggtgtgag[131 bp omitted]tcctgtctcagcctcccaagtagctgagattacaggtgcgtgccaccacactcggctaatttttccttttttgtgtgtgtgtggagacgggtgtttcaccatgttggccagcctggtcttgaactcctgacctcaagcaattcatccgcctctgcctcccaaagtgctggaaatacaggtgtgagccagtgcccagcctgtttccaattttccatgtcacaaacattgctgctaagaacattcgtatacatgtgtccctgggtatatgtggccaaggttctttggcatttctgcatggcgaggagttgagctgtagcatatgttaatcttcatctggactagatattgccgaatcgctctaagtggttgatgtgccaatttactcccccaccacagacacggtctgcaactccacatccttactaacccgggtattgtcagatttttaaatgcttgccaatctggtgggtgtgaaatgggctctccttgtttgtttgtttttagtttgcatgtcccagttactggtgaggaaggtttctcaatcactcgcgttccatgctgcgctggaggggtgtgtgggttggggggaagctcaccttcccacaagcgcacgatcgtggtcctgcagaggtcctgtcccagggcgcactcttccacacggcaatccccgttggtcttacactgcatgcaccgcaggccccaagaggctgggggaaggagggagaggagaggagaggttaactacgcttagctccaagacccccgctcacccctgcatgtcccaataccaacaccaagtctccaggccccgtccattcagattcgtgtccatgttctgctgggttccggccggcggtacttccagtctgtccgttgtccacgttctacctccaccccactaactgaacgttctatccctgcccacaagtcctttcccaaagtcctgccttggcccgtttttcctttcattctgtcctcgtgaggcgtatatcctgacagtcgtatccccgccctctctatcagtacgttctattcctgctcctattaggtctttctcaccgcaccggccctcggtcgattacgcctctccagttctgctggggacgttctagccttgccccacccgcgtcgatctttatgttataccgtcactcccagtgccctaatggaactatccctccactcactccccctggttctacccggctccagagcctctcccggcccactaatttattcccaaattctaggcccggccccatcagccctccggagtttctattgttagatactctagtttcccgcgaagttctgtctccgccctccagctctccaactaggttttggccccgctccagactcatcgtcgaggttctagccccgccctttagctcttcctgaccttatcttcccgccccctagctcctccccgatgccataaccccgcccctagctcctcctcgaggctttagtccctccctctagctcctccttgagattctaacttcgccctttagctctccccgcccctagttttcccctgaggtcataactccgccccagtcccttcttgaggtttcagccccaccctgtagctcctccccgaggtcgtaacccccgccccttggccccttgaggtcctagcccagccccgtagctcctccccaagcttataaccccgcccctagcccctccttgaggttccagccccgccctctagctcctccccgaggttataatcctgcccctcaagagtctagtcccaccttctagctcctcccgaggttataactccgccctctggttacgcctcgaggttataaccccgccctctggctccgcctcgaggttctagccccgctcctagctcttcctcggtctgtaacctctcccgtagctcttccttgaggttccagccccgccctctggctcctccccgacactctctccccgccccaggctccgccccgagattgcagcccagtccctaggcccggtccccgacctccgggccttcccggacatccctttccagctgcgcgttcggagtatcccggagctgttactcattcccggcctcccgcggtctcgagcgctttccgggttattcatcgcggccccaacaccctgtggccacccgccctgactcagttccttctcgaattcctcgacccagagccccccacattttccggggaagtaagtgagagtcgcctcagtgagagggaaaggtcctgagggacagtcccgggtctccagcactggctctgcgccgctcagtcagcctccctttgggccttttgtaaaagggggtcctgtccccccgtttctcagagggggagacccagcagcgtggagagcgctggggggcgctgcagggtcagatcctgcgtattcaagcactggctgtgtgattttaggccagttatctaacctctctgtgccctagtttcctctgcgaaacgaaattaataaagtcccatcgcctagtttgaaattgcaaggaagaggcttcgaagaactccatttaaaaaaagaacacttgggccgggcgcggtggctcacgcctgtaatcccagcagtttgggaggccgaggcaggtggatcatctgaggtcaggagattgagaccatcctggctaacagagtgaaacccggtctccactaaaaatacagaaattagccgggcgcgatggcaggcgcctgtaatcccagctacccaggaggc[136 bp omitted]atgtaaagctaaatgcctttgctccactaatatttccttagctactgagtgccaggtactgcgccgcgtggcgttgcacaaagcacgagaattactattatttgattagggaggatgctgaggactgaaccgcattcctccaactcatcctctgacaacccccaaccccctcaattagaccctgttccaggcgcaggcgttcgggacccagcccctacctgggacgcaggtgtggagcagcagcagcagcggcagcagcggcgggtgacccatgtcgcgagggcagctcctgtgcgcggggtccctgcacgtcttctctccttctggcctcaggaaggaggcagttttgtggccccagggactcctcccagacgttttgcgaaagagcgagtcagccccagatgcgtgggcgcctccccctcctcccgtacgaacctcctccgccacaaacttcccttcccggggcgcggccggctggtggtgaaggggctggctcggccctgactcatggagttgtgatcacagctctgtccccagattgcctgggtgcaaatcccagttctctctcttcctaacgtgggacccggggcaatcgctctccactgctgtaaaatgaggataaaaactttgacggtaaatatgaatgtggctgattatttggctaacaggatttttgttagttttgtcaggagggatactggtattttggaaaatgtccttatctagagatgcatcctgaaatatgcatctcttaaacacttaaaacacttaacccttgctttgcttcccgctgtgcccccagctcctggaccagtgcccagcacgaagtaggtccttggtaaatgttaaaggaatgtgttgagccctcc[134 bp omitted]gaatcgcttgaacccgggaggcggaggttgggttgcagtgagccgagatcgtgccactgcactccagcctggcaacagaacaagactccttctcacagaaaaaaaaaaaaaaaaaaaaaaagacacttcagccaaaaaagtagatatcactgttacgacaatggctgtatgcttaggtgggattctggtttttgtttgtttgtttgtttttgcagatgcttactagagtatttagtggtgaatgttattgatgtctgcattttttgttgttgttgttttggggatttttgttttgttttttctttttcttttgttttcattttgatgtctgtatttattttataatattttagaagaggtcagatgaggtggctcatgcctgtaacaccaatgctttgggaagccaaggcaggaggatcacttggggccaggagttcaagatcagcttgggaaacataaagagccctcatctttccaaaagaaattaaaaataaaataaaattagctgggtgcagtggcccgtacttgtagtcctaggtagttgggaggctaaggtgggaggaccgcttgaacctgggaactggaagctgcagtgagctatgattgcaccactgcactccaacctgggcaacagagcgagaccctgtctcaaaaaaataataaataaataaatacttgagtagaaaataaaggcaaaatagccaaatggttgtatcaattatataaaggtaatcagtatataagggcatattatgccattctgtctccttttctgtgggtttgaaaaggcttataataagttttttctttctttttattatttatttatttatttattgagacgaagtctcactctgtcacccaggctagagtgcagtggtgcaatctcggccactgcaatctccgcctcctgggttcatgcaattctcctgcctcagcctcctgagtaactgggattacaggggcacgccagcacacccggctaatttttgtatttttagtagagatggggtttcaccatgttggtcagggtggtctcgaactcctgacctcaggtgatccacctgccttgtccttccaaagtgctgggattacaggcatgagccactgcacctggccaagttttttttttttttaagtaaaataaaatactaaagataaaattgtctccccgtcttaggatgcatctaactaaacagagcaatttaatgtaggtgcaatgcctggaatagctgctggccgaaatggagggctcaacacattcctttaacatctaccaaggacctactttgtgctgggcactggtccaggagctaggggcacagcaggacgcaaagcaaagttcccaccttttgttgtgttgacagtggggagcagatatgtgttatctaatctttcactgtctgagagggataagcaaactggagaaaacaaagcaggctgaaggaagtatctgggtgcaaatgaggtgtgagctgttttaggtgggtgatccaggaggggttccctgagcaagtggcattcaagcagaggctgaatgcagtgagggaagaagtagggcagatgggcagggaacctttccaaggagcaggaacaaccagtgcaaaggccttgaggtggaagcctgatgagattctaggaacagaagagatgtcagtgtggctggaacagattaggagaggaagagagtcgtaggggatgagtaagtggtagctacttctactgctgtaataatgattatactatgtgatttgttgtcgttgttgttgttgtttttgagacagagtctcactttgtctcccaggctggatgcaatggcgtggtctcggctcactgcaacttccacctcccaggttcaagggattctcatgcatgcctggctattttttttttttttttgagtcggagtttctttcttgttacccaggctggagtgcaatggcacggtctcggctcactgcaacttctgcctcccaggttcaagaggttctcctgcctcagcctcctgagtagctgagattacaggcattctccaccatgcctggcgaattttttgcatttttagtagagatggggtttcaccatgctggccagactggtcttgaactcctgacttcaggtgatccacccgcctcagcctcccaaaatgctgggattacaggcttgaaccactgcgcccagccctaatttttgtattcttagtagagatggggtttcgccatgtcggctaggctggtctcgaactcctgacttcagatgatcaacctgcctcagcctcccaaagtgctgggattacaggggtgagccaccgcacccggccctaatttttgtattgttagtagagatggggtttcaccatgtctgccaggctggtctctaactcctgactacaggtgatccacccaccttggcctcccaaattgctgaaattacagacatgagctaccgcttccagcctgtactatgtgattcttactaactcattgaagctgtaagctaatgattttaagataaggttagaaaacaaaaaacaaaaaaactcccaatggtgagcacagtggttcatgcctataatctcagcactttgggaggcgaaggctggaggattgcttgagctcaggggttcgagaccaccctgggcaacatagtaagaccttgtatctataaaaaaataaaattacagcctggacaacatagcgagaccttgtctctatgaaaaatagaaaaattagccaggtgtcgtggtgcacacttgtggtctcagctactctctggttgaggtgggaggatcacttgagccccaggggtttgaggctgcagtgagccaaaatcgagctactgaactcgagcctgggcaacaaaagtgagactgaaaaaaaaaaaaaaaagaactcccagagaatttcctaagaggtagtatagcccaatggttaagagtgtgggagctggtctcagattgtgaaaatctaaattgcatctacatattggctgtgtcacctctagcaggttacttaatctatctctgtgcccaagccccttatctggaaagtagagatagcaagtatcaccctcccagggctggtgtactgcggaggtaaaagaatccacctaaaatgactgagcatggtggctcatgtctataataccagtgctttgggagaccaaggcaggtggatcacttgaggtcaggagttcaagaccagcctggccaccatggcaaaaccctgtctctactaaaaaatacaaaaaaattagctaggtgtggtggcatgcacctgtagtcccagctacgcaggaggctgaggcacgagaattgcttgaacctgggaggcagagattgcagtgagccgagatcgcaccactccactccagcctgtgcgacagagctagactccatctaaaacaaacaaacaaacaaacaaaaagaagaatgctcctaagatgcttgccacagtgcctggtacatagtatgtgctcaataaaagcgatagctgccagtattatcattgttgcaactctggacattcacctcttcctggagtaggaagggagatggaggcctgtcattgagtctgacgtcaacagttatcacgcgtcagctgctgaagtgggcacttccctggctgggtcaccctgggccaatgacattcttctttctgagcctcagttttctcagctggagaaggggatccctcttgggctggtgtgaaaactaaactagatcggaatgtacatgaggtggggaaatagacagttggggtgttggtccaagcaggcttgagacccagctcagccacttgcttctgggtgaccctgggcagatggcttcactccatcaatccccggctttgccacctatgaaatgggtctggggtgggtagggggcatctctcagtgaagagaaaactcaggtttgagggtcatgcggagctgtgtgctgtgctgctaccac[134 bp omitted]cccacttcagcctcctgagtagttgggacctaggggtgtgcaccaccatgcctggctattttctcatatttcgtgttttttgtagagatggagccttggtctgttccccaggctggtcttgaactgctgggttcgagtgatcctcccgccttggcctcccaaagtggtgggattacaggtgtgagccactatgctcagccaatttcctctttaacgaatgagaggtatttcagagcccactcatccctgcccaaggctgccctcgcctcctgaaatttctgtctctccctgtgtctttgtctttttctatctctctgttttgttgttttctttgtctctgtccctctttctctctctcaatgcctatctctctctctctccaactctatcactttctctctctgtacctcgatctctgtatctgtttgtctctctcttcatgtctttttatctctgcttctcccttttctctgtctctccccatggctctctttctctttctgtgtcattgtttctgtttctctttctgattctttctctctgtctctccctcaagtgacacacacacacacctgtaaggttctgctgacgtgtaaagggaagggaaatgcagggatcaggacctggacactctccagaaacacggcagggatgtcggctccttcctcctcgtgactcacctgggcctcacccagctcttgcctgcctgcgggatcatgggtgaggcccatgggtttcgggggcttccccagcctgtggagaggagaatttcaggcagagacagagagggtgatagaggaggaggcaaagagagggagagacagagagagagagagagagctggggatagagatggaggtggggaaacgagggagagggagagagaagagacccacagacagactggctcaggggaaatctgagatgggggtgtggggggagtgagagagacagaaaacagcaaccgaagaacaaggacagggagaaagaaaaatgggcaagcagggagagagagaagataagagactgacagaggagttagagaaaacaacacacagttgccttcagagaacacaaaatagacacagagatacagggacactgtgtgtgtgcgtgtgtgcatgtgtgcgcgtgtgtgcatgcgtgtgcatgtgtgtgagtgtacgtgcatgcgtgtgtgcgcacacatgtgtttgtgtgcatgtgtgtgcatgtgtgtgtgcgcgcacgtgtttgtgtgcctgtgtgtgtgtgtgtgcatatgtgcatgtgtgagtgtgtgtatgcatgcatgtgtgtgagtgtgcctgcatgcatgcgtgtgtgtgtgtgtgtgcacctgtttggggctccctcatcctcttgccacctgccatgatgaagtgactgccctctggcctggccgctgggaaggtccttctctggttggggaggtgggggggatggggggtggctgagctgatggtagggaaagggccatcgctcataacctcccctttctgggacgcctaacaggccacactgatgtggctttcagatcctggcctggacacctcttagatgtagaggacctctccactcagggcctccctggggagtggaagagctggtaaacccttgagtccaataaccctcttcccccgttttccaggcagagaaactgaggtccaaagggaagactttttatttttttgagataacgtctggctttatcgtccatgctggagtgcagtggtgagatctcagctcactgcaacctccacctcctgggctcaagccatcctcccacctcagctgcccaagcaggtgggatgacaggcgtgcactaccacgcctggctaatttttgtattttttgtagagacaacatttcaccatgttctccaggctggtcttgaactcctgagctcaagcgatctgcccacctccacctcccaaagtcctgggattacaggcatgagccacggcgcccggcctaaaacaggagactttaaatgagtttctccccgtctcaagtttattgtgtttgtgttacagtgggtactgttttgagagtattatctatattattggtgaatctgtaaatatcctatttcgtacacacacacggaaactgaggattagagaggtgtggtgggctgagagatggtccccgaaaatatccaggtcctaagccctggagcctatgggtgttaccttaaaggaaaaaagggtctttgcagatatgattaagttaaggaacttaatcaggaacattttcctaattatccagatgggccctaagtgtaatcagaagtgcccctggaggaaggagggacagggacatttgactgtagacagaagaaaagtaagtcatgggagagaagcagaggaaaacagggtgggagacagaaggtatttgctgcgggctttgatgatggagaaatggccaagaaccaagaaacgtaagaaatgcagctcctgctggaaaacgacaaggaaatcactcaccccggacatctcttgaccagggcactgctctgctgacaccttgattttgattacatgagacacattttgtacttctgacctccagtctgtgagagaataaatttctgttgttttaagccactagatctaagctaatttgttacagcaaaataggacaccaatacaagaggttaactcacttgcctaaattgagctgatattttttattttttgagacacggtcttgctctgttgcctaggctggagtgcaacggcaggatcatagctgattgcggcctccagttcctggcctcaagtgatcctcctgcctcagcctcctgagtaactggaactacaggcccatgtgaccaagcctggctgattttagagagcttttttgtttgtttgtttgttttgaggtggattctggctctgttgcccaggctggagtacagtggtgcaatctcagctcactgcaacctccacatcccaggttcaagcaattctcctgcctcagcctcctgagtagctgggattacagatgcctgtcatcatgctcggctaatttttgtattttagtagagacggggtttcactatgttggccaggctgggcttgaactcctgtcctcagttgatccactcaccttggcctcccgaagtgctgggattacaggcatgagccatcgtgtctggctgcctggctgattgaatttttttttttaatagagacggtgggggagggtggggggtctcactatgttgcccaggctggtcttgaactcgtggcctccatcattcctccagtgttggcctcccaaagtgttggaattaataggcttgaactaccacatctggcttctaaactgacttgttaggccaggtgtggtgcctcatgcttgtaatcccagaactttgggaggccgaggcggaaggatcacttgaggtcaggatttcaagatcagcctggccgacatggtgaaaccccgtctctactttaaaaaaatataaaaattagcctggtatggtggcaggtgcctgtaatcccagctactcaggaggctgaggcatgagaatcacttgaacccgggaggtggaggttgcagtgagccgagaacgcgccactgcactccagcctaaacaacagggcgagactctgtctcaaaaataaataaataaataaataaaataagataaactgacttgctaagtgtagtgtcaggatttgaacccctgcattctggctctgtttcctacacttacacccaccatgctgaggggtgctgccctggagtagggcaagcaaagactaggagctattaatagaagtttcatcctgttctctcccagctcccgcctctttccatctcatccttcagcagccttctttgctatgcctctctctggcttcatggtattaggggtgacttggaaagaagcagggaccagaggaataatattcactgagtttgtgtaaagaaaaaagctttccttgcctctagcaccttgcagctcttttattccaccgcctagatgcaacagcagaaatcatctttgcaattcaaggcctaatattctgaatatataaggagctcctgttatgggttgaattgcttcccctccacaccagaaaaacataggttgaagtcctaacccccagtactcagaatgtgaccttatttggaaatagggctgttgcagatataattagttaagttgcagtcatactgaagtaggttgggccccaaatcactatgactggcatccttataagaacgtggccctaggccgggcgcggtggctcacgcctataatcccagcactttgggaggctgaggtgggtgcatcacctgaggtcaggagtttgagaccagcctggccaatatgatgaaaccccatctctactaaaaatacaaaaattagccaggcgtggtggcgcgtgcctgtagacccagctacttgggaggctgaggcaggagaatcgctagaacccatcaggcagaggctgcagtgagccgagactgtgccactgcactccggcctgggtgacagagtgagactccatctcaaaaaaaagaagaaggtggccctgtgacgacagagagacacaggaataatgccatgtaaagacaaaggaagagagtggagctaggcagctgcaagccaaggaccgccaaagattgccagaaagccactgctgctgggaagagccaggtaggagtcctctatgggtttatggccctgatgacaccttgatcttggacttctggactctggactgtaagacaatacatttgtcgttctgacccacccagtctgtagtactttgttacag[137 bp omitted]accatgaaaccccgtctccactaaaatacaaaaaattagctgggcatggtggagtgcacctgtagtcccagctacttgggaggctgaagcaagagaattgcttgaacctgggaggcggaggttgcagtgagctgagattgcaccactgcactccagcctgggggacagggtgagactcgtctcaaaaataataataataataataataataataataattaatagaggacaggaaaagaagcacaaatgacccctataaaaatgacactaaccagtcacagtggcttacgcctgtaatcccagcactttgggaggctgaggcacgaggatcgcttgagcccaggagttccagaccagcctaggcaacaaagggagaccttgtctctataaaataaaaaaaggttagccaggcgtggtaggacatgcccatcttcccagctactcaggaggttaaggaaggaggatctcttgagcccaagagttcaagactgcaatgcgctatgattgtgccactgcactccagcatgggtgacagagtgagactatgctctaaaaaaaattagtcaataagagagaccccagagatctgtttcgtcccttctaacaggtgaggatgcagcaagaaaatgccttccatgaaccagagagcaggatcttgccagacactaaatctactggtgccttgacctaggatttcccagcctccagcactgtgagaaataaatgtctattgtttataggtattcagtttgacagatggtcttatttatatgtctggactctcaaccgtgatgtttggggtgctgggagcctctctcctcaagatttctcaccctgcaagaggtaagcctgggctccttcatccagtgtcaaagggttttcagcagcaagaaagtgagaacagcagtgacaagttctttttgtttaaatttttaaaactaattattaattttatttatttatttatttatttatttatttatttatttatttattttgagataggatctctctctgtcacccaggctagagtgtagaggtgagatgtcggctcactgcaacctccatcccctgggctcaagcaattctcccacctcagcctcccgaatagctgcgaatacaggtgcacaccaccatgcctggctatttttttgtattttcagtagagacagggacttgctatgttgcccagactgatcttgacctcctgagctcaagcaattcacccaccttggcctcccaaagtgctgggattacaggggtgagccactgcacccggcctaattattaattattattattattatcattattattttgagactcagtcttgctctgtggcccaggctggagtgcagtggtgtgatctcggctcactgcaacctccacttcctgggttcaagcgattctcctgcctcagcctcctgagtagctgtgattataggcacccgccatcatgaccagataatttttgtatttgtagtacaggtgaggtttcaccatgttggccaggctggtctcgaactcctgaccttaaataatccactcacctcggcctcccaaaatgttgggattataggcgtgagccactgcacccggcctaattattcttttttggaaacggggtctcactgtgttgcctacactggtcttgatctcctgggctcaagtgatccccctaccgtgccgcctcccagagcactgggattacagaggtgagccattgcgccctgacaaagctgcaagttcttgaggccaggagctcaaggcccaggctcagaactcatgggacatcaatatgtctcattctattggccaaaccaagttacaagaccagctcagatttgaaaggaggaggatcgacgctatctcttgatggaaggagctgcacagaactcgtggccacttgtattcgaccacacaccttttcacctctcaggttggcaaaaataaaacagtttgataatgcatggagttgatgaggctgtgggaaaacagatactccccattgtttctcctgggggtgtaaactggtacagccctataagaggtaattttgcaattgctctcaaaatcacaagtgtggcaaaaccttcgtcattttccaaaaccactcaccacgtccaggaacttggtgcatgcgtgaaatgatatggtcacagggctcttcattgcagcatagtttgtaacgtcagatgggaaaatactaatgctacaagaggtgcacttatccagcggaaaaagaaagaagaaactcttcatgcaattcaggttacattatggccaagttcaaaaatctaggggcagaacagtgcagggaataccccactgtgcattaaaggagagaggcctgccctggccaatatgacaaaaccctgtctctactgaaaatacaagaattagccaggcatggtggtgggtgcctgtaatccctgctactcgggaggctgaggcaggagaaacgcttgaacctgggaggcggaggttgcagtgagctgagatcacgccactgcactccagcctgggcaacagagcgagagtctgtctcaaaataataataataataataataataataataataataatgaaaagaaaaagaaaagaaaagaaaaaggagaagggcatgtgtctatatttgcttgtagagtatatgcattaaataacttgtctgggctgggtgtgctggctcatgcctgtaatcctaacactttgggaggccaaggtgggaggattgcttgagcccatgagtttgagaccagcttaggcaacacaggaagactctgtccctacaaaaaaaaaaaaaatagctgggtgtagtggtgcgtgcttgtagtcccagctactcaggaggctgaggtgggaggattgcttgagcatgggaagttgaggctgcagtgaactgagattgtgccactgcactccagcctgggtgacagagctaaactctgtctcaaaataaaaaataaaatacaaaacaacttgtctgatgcccccctgccaccacatttcaagtgaagtgcagggaaatgtcccttccctgcatgcctgctcttcattcttcagtccacaagcctcgtgtttgtgcagctcctggcctgtcacccagcccgagttatcggtgacgataacatctagagagactggcttcctctagtcatgaagtgtcaggcgctgctccctcctccccaaactccagacttggctgagggactctctgtcccatcttctcacctctcctgcaccaaagggttcttggtttacctgggaaggatgtgagccaagtccccagacttctccctgccctagcaccccattgagaaaagccatctcccatccccaggctgctatctttcctccttagggttggcaccttccagagtcacctccttgattgtacacactgattgaggggccccacctgggattctgggaagcctggcaggcctgtgggtgaccttgaactcgtcctttctctcgcttgagatctctcctctgagccaagaggggaggtcaacctcaacttgtccccttagcagccttatttatattgctaaataacgatgatgatgatgatgacaacgacaatgacacagcagttactgcccactgttctaagtgctctacataaatcaactcaatcctcacagcagcccttcgatggaggtcctcctagttgccctgttttacaaatgaggaaactgaggcccagtaggtaaaatgtcttgcccaaggccacttaacttggaagtggcagaactggaatttgaactcgggttgtctggttctaaagcgttcatcacccctctggacgggtgtgtggttttcttaaagctcactactacaaatacctccaatcctaacagagccaccatta[132 bp omitted]actaaaaaaatacaaaaaattagctgggcatggtggcgggcacctgtagtcctagctacttgggaggctgaggcaggagaatcacttgaacctgggaggtggaggttgcagtgaactgagatcctgccactgcactccaccgtgggcatcagagtgagaatccatctcaaaaaaaaaaaggagggcacttacagcaatccaggccctgggctacacccatttagcagataaacacactgaggcctgaaataggggaagggacatccccagagttacacctcataggaggagcaggtggggtgtcaaagcccatgaagggtggacttgccaggcaccaggctggaaggcccctcatggggtggttgaaattgatcttattcccactgaacaagtgtgaaaatcaaggtggcccagggaggagcaggaggagaatgacacgggtctcatccagagagggcagatcaatttcccttttggtgcagccctgtgctcaagccagagacatttgggttcaaatcctggttgtgctgattttcttattatgtgcccctggacaaggccttgactgctgtgagccctggttcccttttttgtaaaagagggaaccccagggctgatttcagttgtactggttgttaaaatattgaggtatgtccagatttggttgataaaattcccctgcctggaggccttgagtgccctgatggcatctctgggtcctcccagacatcttcatattctagaaagatgagggaaagaccgggtccctggaggccaacaggctgctactctagcaagtgggcaggattgttactaccaataccctggcctgtattgacaggtggtcaaatattttgagtatcctccgtgggtggggttaatgataatggctggtaggactactgtaaggatttagtgagctaatgtgtgtaatgagtgatgaggcaacccattattattttatattattattattatttcttttttagaggagagtctcactgtcaccaaagctggagtgcagtggtgacatcatagctcactgcaaccttgaattcctgggctcaggcgattctcccacctcagcctccctagtagctgggactgtaggtgtgcaccaccacgcctggctaatttttatttttatttttattttttattttgagacacagtcccactctgtcgcccaggctggagtgcagtggtgtaatcttggctcactgcaacctctgcctcccaggttaaagagatccttgtgcctcagcctcctgagtagctgggattataggcatgtgccaccacaccaggctaactttttttttttttttgagacggagtcttgctctgtcactgggctggagtgcagtggtgtgatcccggctcactgaaacctccgcctcccgggttctagcaattctattctcctgcctcagcctcccgagtagctgggactacaggcatgcaccaccacgcccagctaattttttgtatttttagtagagacagggtttcaccgtgttggccaggatggtcttgatctcttgaccttgtgatctgcctgcctcggcttcccaatgtgctgggattacagtcgtgagccaccgcgccaggccctaattggcttttgccatccagtgttgggcctggccttctcccgcaagggtgcaaaacaagttggtaaagatcagagaagctggatgggtaagcctgaactgtgaagttagatttatcggcaaaatgatggggctcttcagtaacctcaggaaatgccttggatatagcacagagttcagctttagttccagagacataagaaatctgaggacctcagtgtcgttagacagcctggtcttaaggggataagtttttataggttgaggttgtgaagcagaaaggaaaggggtgttagtggggaaagacatcagaaaagaaagaaagagaagggttaagaaccagtagataaggcctgagagagaaagatttggggcttcaaatgcctttttttttggagacagagtctcgctctgttgcccaggctggagtgcagtggtgtgatgtcggctcactgcaacctccgcctcccaggttcaagtgattctcctgcctcagcctcccgagtagctgggattacaggcgtgcgtgccaccacgcccggctaatttttttttttttttttttttttttagtagagacagggtctcaccatgttggccaggctggtctcgaactcctggcctcaagtgatctgcccatcttggcctcccgaagtgctaagattccaggtatgagccacggcgactggcccacctgtctaatttttaaatttttttaagacgctgggtctcactatgttgttcaggctggtctttaactcctaggctcaagcgatcctcccaccttggcctcacaaagtgctgggattacaggtacgagcccctgcacctggccacaacctattaatagtaataataataataacaacatgtccccctgtccttctctggcctcactgagtagtcccaggctttccccacatgcctctcaggacttagtttccccatctcgatgctctctcagtcccctctcttgctgggtgtcccagtggccaggatggtgggtggcaccgctatcttcccggcctatttgctctccctcttccggggctgctaccctggccaaggcccttgaataaaaggcaagggcacctgtgtcctgcttccttctctcctgcctggatcatgctctggctctctctgccctgttgctcctgggagcactggctgccccagcaggtaagcgcgtcatggtccatcagaaagggagagggtcggctcaaggtcacatgtggtgttgggagtctggcttcagagtctgggccccaggtccttccaactgggctcattgtctagcaggcagaagaacagggcagctgagaacctagttctggaaccaggctgcctgggttcaaatcctgactctgtcacttcttagccgtgtgactccagacaaaccacataacctctctgtgcctcattttttccatgtgtgaagtggtgacaatgcccctgcctcagacagttgttgagacattggttgaatccacacgtttgaggagctcagaacagtgccagcctggcagtggctctgtttgagggtgagctctgctggattatccaggagcagttactgttactcttttacctcacctgcctgtctcccctttggctctaattctgccacctttgcctgagttgggaattaagtggtttggatcctagccaggacctcactgtgcgatcttgaattgaaaccctaaacccagcagctcccacttagagattctgtgattctcatctccaaacctttgtctgcgttgtttcatcgacttggaatgccattcgcactcctcacaacaaagaaggttgctgatctcccaatggccctcccacctcagcccttagtcctattctttttttttttttttttttttgagacaggatctcactctgttgcccaggctggagtgcagtcgtgcaatcttagctcactgcagcctgaacttttgggctcaagtcatcctcagcttcctaaatagctgggattacaggcatgagccaccatgcctgattagtcctattcttgaatcgtgtgtgtgtgtgtgtgtgtgtgtgtgtgtgtgtgttctttgtccttctcaaactgcagagtctgatcactgttttcttccttgcaggaagctctaagacatgtccagcctgctctttgctgtgaacctgcattgaaataacttgtccttctgcccaggacttctgcttgtttagccagatgcagctgggtgggggaccgggctggggactggacaggggctgggtggagagaatggacaaaggcagtgggtggaaggggggcatggatgagccatcctgggactggagattgccagccctgcctcatagctcagcctggtgctactggggtaaagggcagagggcagctgaacagcaaaagaggccctggattggccagggggatggctatagagtgggcagaggtcctggagggcttggaaagcaggggccctaatctcccttcctcaaactctatccctagaaaatgggactctcattgagaaggggtcatgtgtggcccctggagaatgctaagaaggtgtctacgccctgacctacagcccccatgcaagcctctgggtcagcacagcctcttgtgaaaacaactgcagccaccttccccagtaaggtttgttgggaggacctcaggctcacacaccagggtagggtgtcatggggacccagcctcaatttcctgcctcacagctttttgtctggctgattggggcaagaaggagactctcagttttctcatctggaaaatgggtgtgatgtaggttttaaagggtgttcatcccctaggctggcacgtggtagacactccttttgttgccatgtttatttgaatactgggaggctaaagagaactccaagctcttttctgtttctctgtctctctctctctctctctctctttttgagacagagtctcactctgttgcccaggctggagtacaatggcgcaatcttggcctactgcaacctccacctcctggttcaaacgattctcgtggctcagcctcacgagtagctgggattacagatgtacacaaccacgtccggctaatttttgtatttttagtagagtcagggtttcgccatgctggccagtctggtctcaaactcttgaccttcagtgacctgcccgcctgggcctctcaaagtgctgggattacaggcatgaatctctgtgccccgcctctctttttgtctttaatagaggggctccccttgaaggctagtcaaacagaacaagaaacctcacaagtggtgataggcccaggtctaggggagcccagccaggagcccaggatgcaaaaatgtttattctttattttttatttttattttttttgacagagtctcactctgtcacccaggctggagtgcagtggtgcgatcttggctcgctacaacctctgcctcctgggttcaagcaattctcctccctcagccacctgagtagctgggattacaagcacatgctaccacaccaggctgattttttttgtatttttagcagatatggggtttccccacgttgaccaggctggtctccaactcctggcctcaagcaatacacccactttggcctcccaaagttctgggattacaagtgtgagccctcatgcacagccccagggtgcaaaatttaaggagatgctcacgctgaggggatagccctctacttgcacaaccctgaaaagtcgtgcctccttaaattttgggcccctggtttcaccctagatctggccctgggtggtgacaaagatcacttttcgttgcttggttatttcttctaagaaggaatttgtacttggcagatgtagcaatggggagaggtagccatcctttcaaacaagtgcgatttccctcctcctaatttgtgtctaattgccctcctaaattgtgtctctcagcaaaataaaacccccaggttcaagttacgaggtgggcatgctattcagtatataaaatgtcaggtatgattataactgcattaattttttttttagacagtcttgctctgtcgcccaggctggagtgcagtggtacaatcttggctcactgcaaccttcacctcctgggcttgagcaatcctcacacctcagcctcctgagtaccatggctacagacatgtgccaccatgactggctaattttttttgcattttgtagagatggagtttcgccatgttgcccaggctggtctggaactcctgggctcaagtcttccacctgcctcggcctcccaaagtgctgggattataggcataagccattgtgcccagcctcggtctcaaacactccttgcagcccctgaaaacttattctggggccaggcgcagaatcactttggagggaaatgatctggattgtgggagtagaggcagtgagagagggagggcaggagaacagaggcctagtgaggaaggatggctgtaggggtgttcctcagcccccaccccgccctgactttgtccactcccaccagaggcagggcccaaggccaagcccaacactgtgaaatgtcactactgttccaggaataagtcggctccatgaactgcactgggaaacagactgcatgtgtcaccctccacgggacctggagtagaggtaagggccccttcacaggaggtgatttttgtggcaggtttcttcccacctgcacaaataaggcttgagcttcatttgcacgtgcgtcctggttatgtattgccatttaacaaatcacccacaggccaggagcagtggctcacacctgtaatcccagtactttggggggctaaggtgggaggattacttgagcccaggagttcaagaccaacctgggctacatagcaagttcccatctcgaaaacaaaaacaaaaacaaaaaaaccccaaatcactcacaaggtgggtggctaaaaatgacaatcatttaatgatctcttccagtttctttggtttgggaattcaggaagagctcctctggagagttctgagtctctcgtatgttgtagtcagagggtgttaagagctggaactgctggggcaggaacaaccaggggctttctgagcatctcttgcatatatgtaagcacaggcctttctatgtggcctctccacatcggttagattgagcttcctcccatcatggctacctcaaggctctttacatggtggctaacgatttcattcagcaaacaaagttacagctgcttggtctttatgtctcagccttggaagtcacataatgtaacttctattctgctttattgatcaaaatggtcacaaaagttccatctggtttcaagatgaaagaggcatggaccccacctgttgatgtgtcatagatttgcaaaggtatttttaaatcaccagtatgatttgcaaacagttggaggagaggccttttcagcaaaagatttataatataaccacagtagccagaggatagactaattatgaagccaatcaaaggatcgagagcagtagcctgggcttctgcttttggcagtatggtggactcaatcctctaaaaggtcttctgctccaaacagtggcacactgggaaggtggaggactgagacagtgaaatagaggaagtggcccatcatggttgggaggagcagtttatcactgacattgcttagaattgctggtactacctggtgataataaaaagcaaactgatttttagttggttttatgatttaaaaaaattctctataggctgggcacggtggttcatgcctgtgatcccagcactttgggaaactgaggcgggtggatcacttgagcacaggagttcgagaccagcctggccaacatggtgaaaccccatctctgttaaaaatacaaaaattacctgagtatggtggcacacacctgtaatctcagctacttgggaggctcaggtaggagtgagccgagattgtgccactgcactccagcctgggtgacagagtgagactctgtctcaaaaaaaaaaaattctctatagacactaagccccttgtagcctgttcccaggctggactgctcccactcccttcccctgcttggtatgccactgtttacagataaacaagatcctgtacagaaatatttttccacactttttggggttgcagaaagttaagaaaatgtccacgtgtccctaagcaaaacaaaaatgtgaacagaaatcataatgggagcagtgagaaaacatggaaggcatggtggcctgggagcaaatgctgataataacctgctttaggtaaacaggtcttgggctggcagcatgcttctggaatttagattcccacataagcaagggacctcggacagaagccaaaatgatccctggtcagtagcacctcctggcactcagtagaatcaaaagcaattccttcccagggaaaagctcccaggattcccacagatgaatatcaaccaaatatgagctcacaatcatagttcatgaaacgcacaaggaaacaagccaccatgagtgatagcagaaataacaaatcacagatacagacctgtgaggagctcagctattgtaattatcagctgtagaacatagcgtaccggcacgtgatatgtctgaaggaataaacttagaatcacaaatgtgagcaggcaacaagaggttgtaaaaactgaccaggtagatttgaaactgaatcatatagaactactaagatggcaactttcagatagcgaaagatagacatcaagttggaaggcttggactctgagcctcttgttgcaatctcatctcatttccacagggggtccccaaattctgaagggctgtgctacaccagaggtctgcaacttacatgagaatgccaccctgggtccagaagactctggatttcatctcaccgctaagcctgaatgcaactgccttactcctacacatccaggtgctttgacccctgccttcctaaaaacccaacctttcttacctccctggatcccctatgctcttttcaaacctatgtgttcccagggtgtccacatttcctacgataatgctcccaatgagtacagttacccatacacacacacacaccacctgacacactcagaagcagaacatctattggcacatatccacaaacatccacatttacatcctagcacccaaaacaaatatgcagaggcacacaaatttctaaacatgaacatactctgaacatattatgtgagtgaggttaaagatccacgttctctttaaatggatctgagcctgggcagcatggcaaaacaccatctcaacaaaacaacaacaacaacaaaacaaagccaggcatggtggcatgcacctgtggtcccacctacttggaaggctgaggtgggaggatggcttgagcccgggaggcggaggtcgcagtgagctgagattgtgtcactatactccagcctgggtgatagggcaagaccccttctcaaaaaaaaaaaaaggaagaaaagaaaagataaatctgatggtgttttccctcttttcttcacttccttgcttgtgaaagaagacagatttgccaatagtcttcttttggcttaacaaagaacagtcacaagaagttttgtcttccgcaaaagtgatatgctaattgaaatagtatttactggggccacagtttattaagcaattcaaccaactgaacagagggatagacgttttagaggtgagaaaggcaattttctctggatacagctgcattccctcagctccagagatgtagaggaaactttgtcagaaactacaccagaaaggaccattctctctctctgtgtgtgtgtgtgtgtgtgtgtgtgtgtgtgtgtgtgtgtgtgtgtgtatgtgtgtttagagacagagtcgccgtctattacccaggctgaagtgcagtggcacgatcatggttcaatgcagccttgactttccaagctcatgcaatcttcccacctcagcctcctgagcagctagcaccacaggcacacactgctacacccagctgatttttcaattttttttttagaggtgaggtcctccctacgttgccaaagctgaagaaccattctgtgatgcaaaagagagtgtgtttactggccggg[138 bp omitted]gtggctggcacctgtagtcccagctactcaggaggctgaggcaggagaacggtgtgaacccgggaggtggagcttgcagtgagccgagattgcgccaccgcactccagcctgggtgacagagagagactctgtctcagaaaaaaaaaaaggctgataggagagtgtagttactgaatttgcaggcaaagccgaaacattctcaccttagcttcttcaaatctccagctgccaggagttttccttttttaaactaagcaatggatttttttttttttttttttttttttgtgagacagagtctctctctgtcggccaggctggagtgcaatggtgcgatcttggctcactgcaacctccacctcctgggttcaagcgattttccctgcctcagcttcccaggtagctgggattgcaggtacccaccaccaagcctggtgaatttttgtatttttagtagagatggggttttgccatgttggccaggctggtctcgaactcctgacctcaggtgatccacctgcctaggccccccaaagtgctgggattacaggtgtgagtcactgtgaccagccctgagcagcggatttaattaattatcacaatgaagaaaaaaggctgacttgggagctcgaaatttacaagatggaaagaaaaagggcaaaataggaagactaacaacagaaatgtgggacgcggaatttttgcacacatgatccctgtggacacagacacagaacatatctatgcatggacacacaggctttcatatatatgacatgggaaagagacaggcataaacacccacaaacatacaaaagcacaaaatatacacaggcaagctgaaatacattaccaacatccatgaacgttcacatctgtataccaacatatatatatatacaagcacccccacaccttgatggaaacacagacacacccagccacagaaacacacacatacccataaaaccagccttatacacatacacataaacacacgcctttgtttatacagacacgcaggtaaacacctactcacacagtgtcctgcagagctacaaaaacacacatccctgacctcctgcagacagtttcagaaacacacagacaattcaacacaggaaggcacagccagatgtgcacacagacttaacaggcctgcaaacttgcacacacaaatggcattcttgcagaagtgcgcacaaaaggcacttttgcgcactcatgggcacatactgatgtgcctggaaactcagctccatgcacgtgcatgcacactggttgtcttccatccagttcatcttcctctgtccccaggtcctcatgcaactgtgacccacaccaaagctgagaccaccgactgcttcacctgctgagacctccacagctgtggcccccttccatgcccagaggataatcactactgccttcagatggcaggcatcacaggtgagtgcccatggggacagaaatagggcttggggtacagcaagacctatcctcactctcccactttgctgcctagcttcagccattgtagccttttcctggacatgcagggcagaggctagggtgcagtggagggtgtgagtttgaaatctgctgccatagttgtttaagttactgctgaataacaaactggccagaacttagtggcttaaccagtcataaaaagacaaatactgtatgatttcactgagttatctagagtagtcaaaatcattgaaacagaagatagaatggtggttgccagaggttgggggacgggggaatgggagttgttcaatgggtacagagtttcagttgtgcaaaatgagttctagagagctgttacactcaacaatgtgaatatagttaacattactgaattgtgcacttaaaaattgttaagaaggccagccgggcgcagtggttcatgcctttaatcccagcactttgggaggccaaggccagcggatcatctgaggtcaggagttcaaggccatgctttgaaccttgtctctactaaaaatacaaaaattagccgggcttggtggtatgcgcctgtagtcccagctacttgggaggctgaggcaggagaattgcttgaacccgggaggcagaggttgcggtgagccaagatcacaccacttcactccagcctgggtgacagagtgagactccgtctcaaaaaaaaaaaattgttaagaaagccacacatgatggtttatgcctgtaatcccagcacttagggaggccaaggcaggagaatcacttgaggccagaagttcaagaccagcctgggcaacatagtgagactccccccatctctatttttttaaaaaaaacattaagagggtatattttatacagtgtgattttcaaaaaaaaaatcacaattgaaaaaaagcttcttggattagacaagtatttgttatttctcacaattctgcagctgactgggctcagctgggcagttcttctgctctaagtggtaaaggctgaggtcacttatgtgattgcattcagctgggagcttgactgcacctggaatgtttaagacagctggggagagcctcgctcctctgagctctcactagtcagtttcctagcttgagcttccttatagtacggtggccggcttctgagaaggaagaagtgggaacaaccaggccttctaagggatagacccagaactgtcacagtgtcacttctgccacagtctattggtcagagcaaatcccaaggcaggctcagatttaaggggtgacgtaacagattccacctcttgatgagagagtggcaagattatgttgcacaagagcatgcaggatgggagatacagttgtggccatcttggtatctactacaacactctgggcaggcagccccacttaaggctcctgtcactctctccccatagaaggaaaagtggactcttctgtaaacgggaagaggagttgaacttgaaaccggctctttgctatctttttacagcataaagagacatagtaaagatagtgttccaggctccagttctggacatttctgggatcttagagaagtttcttactaagtccatgaggtgctcatagacagggtggggagacctcacagatacagagccaccctattaattgaaaccctaaggagagaaggcaggggatcatggaaggctttctgaactatgtgatttttaactgttgttgttgttttgagacaaggtctcactctgtcacccagggtggagtgcagtggcacaaccttggatcactgcagccttgacctcctgggctcaagcgaccctcccaagtaggtgggactgcatcactatgcctggctaattttattttattttttgtagaggcggggggtcccactatattggccaggctggtcttgaactcctgggctcaagtgatcctcctgtcccaaagtgctgggattacaggcatgaacaattgccccaagcctgaacttaatgtgtcttaatgaacaatgaccagctttggatgtattatggggagatctcaggcagagtgaatgccatcagggaaatactcagagagatttggggagttcggttgggtggtgggttgtgattgcctttcctcactagcctggcctccatctctctccaggctttggcgaaggtaaccctgtctcctggagaaacggtttctgcgtgacctccaaggactgcaaatttggcaactccatctatgccctgacctatggtgttggctttggcttctgcgtcaacaccacctgttgccaaggcaactaccaggagcccacccctctcggtatgctgtcaccagaaagcagtcagatgggtggccaaggaggtggtgggtgactctggaggcagagttgaggaaggaatgcaggaaggaacatcactcaaccccaaccaggctgccctcaggcaccctgatcccagcttgggaggaaatcccaccaaggtcatgacaatattaagttcgtgacaatgtggtagagcctaggagtgcactcggggccccgggaggtcctgagattccttctgactgaccttcatcctcttctacacagcagctcatctggcctcacacaccctgagtgagatattgtgtcctacatgtcctgggagctacttggagccctgcaattcctccttctacatgcagtgtcccagtggggaatctgagtgtgtccagctggacctaacgtctgaagaaggtaatggggacagcacatgtgtgtgtgtgtgtgtgtgtgtgaagaaggtaatggggacagcatgtgtgtgtgtgtgcacatgtgtgtgtgcacgagtgagccttagcacgttagatttggatactggtgtgcttgagtttggagtctcccctccaccctttactctgtgtagctcaaggcaagtgactttatctctttgagcctctgttttctcttctggtaattggggatggtagacacacaccttgaagggcgttgtgaggacaaagtgaactcatgagggaggtgacagagtaaagggcataagaacaggactctagggccaggctgcctgggttcaaatgctgaatccaccacctgagctgggtgaccttgaccaggtgactttgcctctctgtgcctcaatttctccatctgtaaaaggggataacttggtatgcaacaagttctttaaaaaacaggggagggccgga[138 bp omitted]gtggcaggtgcctgtagccccagctactcaggaggctgaggaaggagaatggcgtgaacccgggaggcggagcttgcagtgagccgagatggcgccactgcactccagcctgggcgacaaagcgagatcccgtctcagaaaaaaaaaataaataaaattaaaaaactgaaaaaaataaaagatctttggactcaaacagacctgggtttgtggtgtggattcacaatttatctgcagtgtagtcttggacaagtttcataacctcgtctcaaaaaaaaaaaaagaaaaaacaacaacaaaacgggaataacaacagtcgctaagtcctaagactgttgtgagaattgaataagataatccactaaactatatcagtgctttctgaaagaaatgtaatgtaagacacgtgtgtaatttaaaattttctgggccaggtgtggtagctcacacctgtaatcccagctctctaggaggccaggatcgcttgagcctggaagtttgagaccagcctgggcaacagaggcagaccctatctctacaaaaaattttcaaaataattagctgggcctggtgctacggcctgcagtcgcagctactcaggaggctggggtgggaggatcaccagagcccaggaggtcgaggctgcagtgagctgtgattgtgccactgcactccagcctgggtgacagagcgagactctgtctcatttttttaaaaaaagtttttaaaaaaggaaacaaacattgcacacgagtgaaaacacacctgtaacatacgtgtaaggtagaaagagtgacaacgagagagagacagccgtgaccagctcccagctcaaagaaaagaacattcctgatgagctttcacgaaggacatggactcgaggggctcgcgggccctgtgcgtgtgcaaggcgcgcgcgtgtgcgcttgggtgcgcgcgggggtggccttctgcctgcgcgcgcccccacgtcccctccttgcaccctgtctccgtctcggcaggcggccggaacgtgaacgtacgcggctgcggctcccgagacctgtgcagcgccctggactggacccacgggctctctgtgctcccaagacactggctgtcgagccactgcagcccccaccgccgcgccgtcctagagtcccactgccgctcgggcgccgcgcccggcctccgcctctccctcccggttctggtggtagtcctggcaaccgcgacgctgtgctaaggaatcccgcctggaccaccccgccgcccgggaggccccctccacctgcttgttcggcacgtcgctagatggtgccctggctcccctctgctggggcaatgcggagacctggaagcctctggtgagaaactcaggaagcagggatgagcttcctccctcagactagcgtttcccaaagccagaccttctgctccagactcagggcttactcaaggctaagtcctctttcctcacaccagggtcccaaaggccatgcctccatcagcctagggtgtgtcttccccgctcagactaaggccactcacctgctgctgagatcaggcgtctgctcaactaagttggggcggggcgctatacctcccccctcagattagcaccttccccaaggccaaacctcctccctcagaagagggctgttcttcttcctcaagttactaagcctccttcttcaaacgaggggatacccaatatccggctgctcccagacaccagggatgtgtctcttctcccacacattgacaagcaacttctcttttgttctccctgtttggggtctagcaaaatcctgggcagccaaggcggggcttgaggatccgatacaccctcttccaaggttttcagagcagcctcctccacccccaccatgggccaagacggggcagggggcatgggtggggtgaggagcccctcttctgtgtgggcccaatctcccagctgtaaccagatctgaatgaatcacatctcacaatgccaagtggtttgagtttcctttttctgaagttttagcctcaaagagggccctgatgtggtcctctctcctctgaggccaggggaggttaagttacttcaactggtgaacctggaggggacaaaccgacaacagtgtctggccagggtgggcataagaccaaatgctgcatctggaactgaactcagaggattgagcggagaagtgaaactgggttgctcaccacaggcagaatgccaggaaccatttgctttctgctgaaagtggctgagcgcagtggttcacgcctgtaatcccagtgcctgggggctatgacagtgggagggagggctacctaagaaatcactccaggccatgcaccagacagattaggcggcg[134 bp omitted]gaaacccgtctctactaaaaatacaaaaacttagccgggcatggtggcgagtgcctgtgttcccagtcactcaggaagctgaggcaggagaatcacttgaacctgggaggcggaggttgcagtgagctgagattgcgtcactgcactccagcctgggcaacaaagcgagactccgtctcaaaaacaaaaactgaaagtaacagaaagcccaaccgaaagaatagaaacaattcatttaacattcatctaacaaatctttatcagtcacaagctatgtattcttttgtaaatgagacactggcgatacagacaaaattctgtgctcttatggaagtggtattttagtggaggagacacataataaataaatatcacatatcgtacatcacatatcagtgagtactaggaaggaaacagtgcggggaaggagaatggggaacgctgccaaagagatatgatcttatacatggtgagtaagagcctcagtaaggtgacgtaagtaaagacctaattgaggaagtaaagacctacgtggggcaagggagaaggccatgcagttgtctgaggtgggggaggaggacattccaggcagagggaactggaaaggcaaaggctccaaggcagatgcagtaagaaacagttaatgtgggtcagacgcagtggttcatgcctgtaatcacagtgtgattttgggaggctgaggtaggaggattgcttgaggccaggagttcaagaccagcctgggcaatatagcaagatcccatctctacaaaacattgaaaagttagcctagcatggtggtggactacagg[137 bp omitted]ggaggc[133 bp omitted]aaaaaaaataaaagatctttagactcaaacagacctgggtttgtggtgtggattcacaatttatctgcagtgtagtcttggacaagtttcataacatctctgagccttgtgttcccatattgtaaggtgttattgtaaggtacattaagcacaaggcttggcccaccctaagctttcaaccaattgaaatagtcatgtcttcaggttgttaatcatgaggactgtgctattatttatccacattgtatagaggaagaaactgaggctgaaggaggctaagagactgctagtatgaagaacattgggactgaacacacatctgtctgactctagaagataaaatttcccccccttaaacattaagaaaatgtccaaatatacacaaaagtagagaaaatagtataatatctatgacagactgataccccaatctatgatgggaccaaaatgtgactgagcccagagcccatagcaggcgcccaggagatgtttgcagctggaagcagtcattaaatgacccttcagtatcaatctctcagtgtccaaaattatgcacattttgccaaattatctctctcttccttcccccttccctgcctcctcctttcctacaccttcccctcttcctccctcctcacctctctcttttgcttttttttttttgagatggagtctcttgctctgttgcccatgctggagtgcggtggcgtgatctcggctccctgcaacctccgccacccaggttccagcgattctcctgcctc[133 bp omitted]ttggcctcccaaagtgctgggattacaacgtgagccactgctcctggcctttcctttgcttttaccctccctcctttgctctttctctctccctccttcctttctcccttctttcctcctctctctctttctccctcctctccttcatacttctttcttcctttctcccttcttgccttcctatattccctccctcttcccttctttcctttttgtgctgagacatttaaagcaaatcccagatatcatatttcacccataaatacttccctgtgcatcagagcccatgctttcgactcttgtaggacggacacatcctttctgggagggaggatggaataaaataaagcatactgagagcttagcataacccacacccatccctgcctgtttgcagaaggcctagaatatcctaatccttcaggggagatctcccttcacccatggatctgtgacattcttctaaatccttcatagaaagctcatatcaaaagtgactagttcacctgtctctacaaaaaaatcaaaaattagcctgggtgtgggggcacacaccagtgttcccagctactcaggaggct[135 bp omitted]aagagacatagccacagagctcagcatagtggttcagaggatgtactcaggttccagtctgtctgggttcgaaagccaacactttgccagttactagttgtttttttgtttttgtttttgttttttacctttggaaacagagtctcactctgtcactcaggctggagtgaagtggcgcaaactcagctcactgcagcctctgcctcccaggttcaagtgattctcctccctcagcctccccaatagctgggattacaggcgtgccaccatgcccagctaatttttgtatatttagtagagatggagttttgccatgttgcccaggctggtctccaactcctgagctccggcaatctgcctgcctcggcctcccaaaatgctgggattaccaccattttgtgagccactgagcccagtcactagttcagttactagtggcctcaggtgagtaccttgacctcagctttcccatttgtgaaatgggacaatagtggttcctgctcacagagtggacacaaaggttgagagagtccacacatacacagaactcagaacagcgcctggaattcagagttcaacacaggtaaatggtggcccttactgtcattattggggagggggagtgccctttgggtcatgggtcccgtttctgtctgttacccaacatggcctcccgttgtgaaggttgcctaccccaaggtatgggtgtgaaggaacctgggggtggtgaggaaggaagcaacatctctgccagactggagtctcgggggatgggtcccggatatgacctgtcctggctgagtccagagtccatggcaggtggtcaggaaacatttgtggaaaacagtcatttaatggtcctggaatctgcaggggtaaaagggactttggggatggggtggggctaacctgggtgaagaatttgatgttattgtacattgctaattttccataggggcatacatgtaggcatattattcaagttttaaaattttactataaattatttaaaacaaacaaaaacaaataaagaataagtggagtctcttggcactcagttgaaagacaagaaacatcaaaacatttgaaatacatacccagtggccatagctgtccctggccacagctcctttcctctctcctcacctgagatcacctctatcctgaacatggtatttccaattttgccacctacaggcatgcttttgattttttttttttcagacaaggtctcactctgttgcccaggctggagggcaatggtgctatcaatagctcactgcagcctcaacctcctgggctcaagtgatcctcctgcctcagcctcctgagtagctgggaccacagtcatgtgccaccatgcccagctctttcttccttccttccttcttcctttcctttccttctcctttccctcccctcccctcctttcccctccgcttctctctcctttccttccttcctttctttctctctctctctccctccctccctcccttcttccttttttttttttttttgagatggaggctcactctgttgcccaggctggagtgcagtggcatgatctcaactctctgcaacctccgcctcccaggttcaagtgattctctcagcctc[203 bp omitted]gtctccctatgttgcccaggctgttctcaaactcctgagctcaagcaactttcctgcctcgaactcccaaggtgctgggattacaattatcagggtgagccactatgcccagccacctttaattttttaaggaaagttttctcttcttttctgcttggctctctcctcacctttctcttctctcccccacagactccttcataggggtgctcatagctcactgcagccttgatctcccgggctcaagtgattcttccacctcagcctcccacgtagctgggaccacaggcatgcaccctcatgctgagctgtatgtatatgttttgtagagatgggatctcactatgttgcccaggctggtctcgaactactaggctcaagcgatctgcccaccctggcatcccaaagtgctgggatgacaggcaagagccactgtgcctggccaactctctgcatcttgcttttctcaaccctccgagtcatttgattcaccctttctaatggctgtgtggtgtggtttccatggcctatggcatggatctaccaacatttattcagcagtcatcgtcctattgaggggaattgacgctgttttctcttttgtccctcccactatgagagatgcagcagtaaacatcctcctgacaagacagttatcatctgttatgtgtctctgtgtcctgaataatttctaatgaattttaaaagtttggggcaggtgcagtggctcacacctgtaattccagcactttgggaggctgaggctggtggatcacgaggtcaggagttcgaaaccagcctgaccaacatggtgaaaccctgtttctactaaaaatacaaaaattagccgggcgtggtgttgcatgcctgtaatcccagctactcaggaggctgaggcaggagaatcgcttgaatccaggaggcggaggttgcagtgaaccaagattgcaccactgcactccagcctgggcaacagagcaggactctgtctcagaaaaaaaaaaaagcttggatatcatatccctttcatgcatgttttaaaaaattcaaaaatgtgtaattaaatgaaattgaaagttacacttaaaaattagaagtaagaggccaggtgcggtgggtcacacctgtcatcccagcactttgggaggccaaggtgggaggaccatttgaagttgggggtttgagaccaacctggccaacatggtgaaaccctgtctttactgaaaaatagaaaaattagccaggtgtggtggcggtcacctgtaatcctagctactccggaggctgaggcagaatcgcttgaacctgggaggcataggttgcagtaagcttaaatcatgtcactacactccagcctgggtgacagagcgagactctgtctcaagaaaaaaaaaaagagagaagaagtaagaaacagtgaagtggccctcacctccccgggtgtgccccactccccatgtgccatttccatccagatggggccccctagacatcctttttcccctgcaggctccagggagtggtcaatgaaattccttcagtcatgaaaagttccatcagatagatctttaggagcaggggtgctcaactgaaggaaatgtgtgcgtttaattcattaataagtgttgtcagatttgcctcaagtgtttcatctggggccttcctgcatggagaacacctatttctctccatcaggccgaatccaacttcccagccatcccttctgcctcctcccaccctctctctctgaaccttccaaggtcacaacgtggggttctgaccagtgttgcgctgagccacgtggggcctgacacaaaaggcactatttacccatgcccctctgtcatggtttcatttttgttttgtgtttttgagacaaggcctggctctgttgcccaagctggagtgtactggcttgatctcagctaaatgcaacctccgcctcctggcctcaagccatcctcctaccacagcctccaaagtagctggggctatagacgcctgccaccaagctcagctaatttttgtagagaccgggttttgtcacgtttcgcaggctggtctcgaactcctgggctgaagcaatccgcccacctcggcctcccaaagtgctgagattacaggtgtgagcctctgcacctggccttcatgtaatttttttgtttttttgagacagagtctctttctgtcacccaggctggagtgcagtggcatgatcttggctcactgcaaccaccgcccctcgagttcaagcaattctcctgcctcagcctcccaagtagctggaactacaggcacatgccaccatgcccagctaatttttgtatttttagtagagacagggttttgccatgttggccaggctggtctcacactcctgatctcaggtcatctgcccgccttagcctcccaaagtgctgggattacaggtgtgagccaccgtgcctggcccttcatgttttttcagtggctaatttttttccagaacattaaagtagtcaaaataatattgaaaaattcttgagtgggtgtattaaaactcacgctatttcaagttaaaatattttaattacaacaatataaaatgtattataattttatttcagcttaagttaattaaaaattattgaacatcatcacttggttaagagaaattgtcaagcgtggagattctctcaattgaaaatgaaataagccaagatgtagattttgaaaacattattgatgagttatttttccatcaaagctggagtgtatatttagggcttggtgtggcattggtctttatttagaattttgatattttgttcatgaaaatatcagggctgggcacggtggctcacgccagtaagcccaacattttgtgagggcaaggagggtggatcacttgaggtcaggggtttgagaccagcctggacaacatggtgaaaccctgtctctactaaaaatacaaaaattagctgggcatggtggcaggcgcctgtaatttcagctactcaagtggctgaggcacgagaatcgcttgaacccgggaggcagaggttgcaatgaacccagatcacactccagtctgggcgacagaggaagactctgtctaaaaaaacaaaagaacaaaccatggattttttggcattaatttttattagttaaaatattgcattaaaaattgcattaaaatataatttatctcaatgactcaatttttcgcactcccttaaattttgcacccaaggccagttcctcattgtccttagttctgaccaaattgagtcactgaatgtagaagagtcccacctcactcctggcttgtttctggaaagcctgtgggttggctgggctcagctgtatggttcttctgccccccatgtggtgttggctggggttacacctgtgcctgcattcagctggagctcatctgtggctgaaatgtcctggatggcttcaagctcatctccatgtggctgcagtctctacatgaggtctctccagcacggtagcaggacctctttgcatagtagttctggagaaagaaggagaaaacaggagctgccacctgttaaggcctgggcttgggagtcccagagtgtcacttcttgtgacaaagaatgtcaccagactggcccaaatttaagggaaggggaaagagactctgcctcttgctagaaagagtggtacatgcccacagggaagggaaaattgccagtggcagtctatcccttccccaaaccccttccccaactgcccacctctatcctcttgcttgctttttctttgtttttcttatcattacttgacactatcttaattacttttgtttataagctccatgagagcaaggactgtttttgttttgttttttgttgttttttgagacagagtcttgctctatcaccccagctggattgcagtggcacaatctcgactcactgcaacctctgcctcctggattcaagcaattctcatggctcagcctcccgagcagctgggactataggtgcccaccaccacacctgactattcttttgtttatttatttatttatttatttatttatttatttatttatttcgttatttacttattttgtagttttagtagagatggggttttgccatgttggccaggctggtctcaaactcttgacctcaagtgatccacccacctcggcctcccaaagtgctgggattacagtcataagccaccatgtctggccctttttcttcttttttcttatcactacttgacactatcttaattacttttgtttattctctacatatttaaaaaatatataagctccacgagagcaagggccttctgtgtcttattcatcactgtatcagtacctaaaactgtgcctagcacctaaaaggcagccagtatttacatgaatgaatgaatgaatgaatgaatgaatgaatccctgaggactgacttcaggtttacccaggttgtggagagtggagagaaggtggaggccaccacatgtagatattcctaggaaagtgctttagaatttctaagagacacagagagaaagggcagggaggaaaggaggcttgggagtgggcagaagaaatcgttcagggactgtctttttcactgctgtgtctccagcctcgaccagccagggcctgactcacagtaggtgtctggaaagcatgtgttgaatgaatgaactttctccaaaaatccttcactgactccacccccacccccaggctgggtcaggcaacccccatggctcccacacctctctgggcagcttcaaccccattgtaaccactgtgggtcatcactgtctgaggacggaggtgtgttccctacaagactcagagtccatagggttggtgctgtctcagtcaccactgggtccccaacatcaaccaaggggttcttggaggtagtaagtatactttgcatcaacctcctctctgtggggcagagccgtcccatcactgctgtattctcaccccggagggacacagagtagacactcacaaatcaccttcattgattctaagagagattcgttttcctttttcttttcccacattttaacaattttttttaagagacagagtctcactgttgcccatgctgaagtgcagtgatgtgatcacagcccactgcagccttgacctccatggctcaagcaatcctcccacctcagcctcctgagtaacaaaccacaggcacacgccaccatgcctggctaattttaaaatttttttgtagagatggggtccccctatattgcccagggtggtctcgaactcctgggctcaagcaatcctcctgtcttggcctcccaaagtgttgggattacaggtatgagccactgggtctggctgcaattttaaaaataagacaattgactgggtgccgtggctcacatctgtaatcccactttgggaggtcgaggcaggcagatcaactgaggccaggagtttgagaccagcctgaccaacttggtgaaaccccatctctactaaaaatacaacaattagccaggcgtggtggtgcatgcctgtaatctcggctactcgggaggcggaggcaggagaattgcttgaacctcggaggcggaggctgcagggatctgagatcgcgccattgcgctccagcctgggtgacagagtgagactgggtcccaataaataaataaataaataaagacaacaatgaagtttgctgcatcacttgcctcttcctttcacaaaagatttctctgtagcatgcgacgctgtttgatagcattctacccatggcagaactttcaaaattgaaggcaatcctctcaatccctgcgactgccttatcaagtaagtttatgtcatatcctaaatcccctgttgtcaatttaacaatattcacagcatcttcaccaggcgtagattccatctcaagaaaccactttctttgctcatccataagaagcaactcctcgcctattcaagtttgatcatgagattgcagcaattcagtcacatcttcaggctctacttctaattttagttctcttgctatttctaccacatctgcagtaaatgcctccactgaagtcttttttttgttgttgtttgttttttgagatggagtcttgctctgtcactcaggatggagtacagtggcatgatctcagctcactgcaacatccgcctcccaggttcaagcagttcttctgcctcagcctgccaagtatctgcaattacaggtgcacatcgccgcgcccagctaatttttgtatttttagtagagacgagattttgtcattttggccaggctggtttcaaattcctgacctcaagtgatccacccgcctcagcctcccaaagcgctgggttacaggcatgagtcatcatgcccggcctttttgtttttttgagacagggtctggctctgttgcccaggctggagtacggtgttgtagtcattgctcactgtaaccttgaactcttggaatcaaacaattttccctcatcagcctcccaagtagccagaactacaggcaagtgtcaccacactcagctaactttaaacattttttgtagagatggggtctcacgatattgcccaagctggtctcaaactcttggcctcaagggatcctcccaactcggcctctcaaagtgctgggattacaggtgtgagtcaccatgcctggcccctatctcagctttggacacgccttcttcactgagcttaatcatttctagcttttgatttaaagtgagagacacgtgactcttccttttacttggatacttggaggccattttagagtcattaattggcctaatttcattatagttgtgtctcacagaagagggaggtgcaaggagaaggagagagacaggaaaatggccagtcagtggagcagtcagaacacatacaatgtttatcaattaagtttgttgttacctgtgggcacagtttatggtgccccgaaatgattacaatgctaacatcaaagatcaccataccagagataatgatgatgaaaaagtttgacatgttgtgagaatttccaaaatgtgacacagagacatgaaatgagcacgtgctgttggaaaaatggcaccaacgggcttgctggacacagggttgccacgaactttcaatttgtaaaaaccatagtatcaggccaggcggggtggctcatgcctgtaatcccagcactttgggaggccaaggcgggaagatcacttgaggccaggagttcaagaccagcctggccaagatagcaataccccatctctattaaaaataccaaaacaagccgggcatggtggcgcatgcctgtagtcccagctactcgggaggctgaggtaggagaagcccttgaacctgggaggtggaggttgcagcgagccaagatcataccacgcactccagcctgggcaacaagagcaaaactccgtctcaataaataaatgaataaataaataaataaaacaagagttgggcatggtggcgcgtgcttgtggtcccagctacttgggaggcaaaggtagtagagattgcttgagcccaggaggtggaggttgcagtgagcagagatcacgccactgcactccagcctgggtggcagaacaagaccctcttctccaccacatccccgcccccccgcaaaaaataccacatagtatctgtgaaggacaataaagctgcatgcaataaaatgaggtgtgcctgaaattgagtttattattgaacgaatgaaagttctctctcaactcaggttctttgcagaggctggtcccttagcctgggatgcaactccctaatgtgccatctggctcactcctactcatcctttggatctcaggtcaggtgccccctcctccaggaagccctccctgactcccaggctgagtcgggcttcctcctttgtgctcccacagccctctggggtcccccatcccagtgctgccccctctgtcatcattatcttgggatggatctgactccaccactggactctgagtcctgtgggggcagagcctggctgtcttgtccattgctgcgtttccagcatgcagataggcagggtgcaacccctctctctctggctggtgctctcaggagctgctaggggcatccctgggaacatgccagtctgcatcggtgcatgtgtgcaggtggcagtggctctctttcttggtccacaatcatcctgggctgcaataatctccattttctcgggcctggagcccctgaagcagtgcctgggtttgatgcatctctggagccctagctgctgcagcagaatgaatgaggttcctgaatggagtcagtgggtttcggggtttctgtatatgttgtcagtgtgtaactgtgtctcttaaagtctgcacatctgtgtcccggaatgtgtgtgtttgcgaggctttggtaagtgtgtgtttgtctgagtcttgctttccttcagtgactctgttgttttgtttcgtttagagacagaatcttgctcagtcacccaggctggagtgcagtagcatgatcacggctcactgcagccttgaactcctgggctcaagcaatcctcccacctcagcctcctgagtagctgggactacagatgtgcaccatcat[186 bp omitted]gcggtggcaggcgcctgtagtcccagctactcgggaggctgaggcaggagaatggcaggaacccgggaggcggagcttgcagtgagccgagattgcaccactgcactccagcgtgggagacagagcgagactccgtctcaaaaaaaaaaaaaaaaaaaagagatagggtcttgctatgttgcccaggctggtctcaacctcctgggctcaagcaaacctcctacctcggcctcccaaattgctgagattacaggcgtgagtgagccgccatgcccagccacgaagtaactctgtatttgaggctctttctgtgtctttcccttctctcttgggccaggggtgcgtgtccatgcattttgggaaggagtccttgctgtctgctggtctgtgtgctcggtgtccggggaagtctgagaaccatgttgttcactctcttcagctctgtgtgtttgtgtcagtcagtgagagcatgagtgagtcgtgtgtcttttgccctgcacctccctttcacctgtggcttaagaactctgtactatgcggccaacagcccactcttccccagctctcagggtggctctgagctagtctattccccttctgggcctctctctccttagttgttctcagaggctcctttccagaactggcctgcagatggtcaggaaaatcctctgagtagcgttattgtaaattccctacaagaggagaatggagaaggccctgtggagcctggcctgggcagagaggaagcccggaggggagacaggacagagacacttataaaggacaagaaggggccgggtgtagtggctacacctgtaatcttagcgctttgggaggcggcataacctgaggtcaggaggtttgggaggcgaggcaggcggataacctgaggtcaggagttcaagaccagcctaggcaacatggtgaaaccccacctctactaaaaaaaaaaaaaaaaaaaaaaaattagccaagcctggtggtgcatgctagtagtcccagctactcaggaggctgaagcaggagaatcacttgaacccaggaggcggaggttgcagtgagccaagattgtgtcactgcactccagcctgggtgacagagcaagacactgtttcaaaaaaagaaaaaaaagaaatcaatgactaaattattgggcttacaagatagcagatcagcctcccgagtagctgggactacatgcatgcaccacatctggctaatttttgtatttttagtagagatggagtttcaccacattgcccaggctgatctcaaactcctggcctcaagtgatgcactcgcctcggcctcccaaagtgctggcattacaggcgtgagccactgtgcccaccagcaatgaccgaatttgtatcatcaactttcacacttctctggggaactgacagtcccctgggtggagggtggagtggtagcagggccaagcccttggaaaccaatctgtgaatctgagactttgtccttggggggtgatggagaccatggaggattttgaacaggtcttggtgttagaaagatctctctggagtcttcaggggaactggagggcccagtgtgagtgggtggtgaccccatgagcagctggggcttggggtccctgctccacctccgggccccaccccctgacatcactgtcgcattattgcaccaggtctggctgaccaataagctgctgcttgctatgataatgggtcctagcaacggtgtctgaccttggctaagagggaaggagatcctatcagtggggagagtgtgaggggagagggagagcctgcagggcaggtgagtcccccagggctctctcgctgggcccctgtgcgtgggcggagcaggagcttatggtctaatccggaccccctcagcccaaattccaaccactgacttgtctgccccttgctgccaggacctgttccaggttcctactcttcccaccgcagaccatactagggagagggcacacccaggataggaggctcag[136 bp omitted]ctacaggcatgcgccacaacacctggctaatttttgtatttttagtggagatggagtttcaccatgttggccaggctggtctcgaactcctgacctcaagtgatccacccacctcggcctcccaaagtgctaggattacaggcgtgagccaccatgcccagccgggaacaatgtcttaaggacatatttctgtggggggtggagtggggtagcagaggatggggtgagtggtaggaggtgaagagacggggtgcagggggcaaggagacaatgcaggaggcagggacatgcagctgaagggagagtagctctctaggtgggtgaaggagcctggggacctgggttggggtcctggctatgcctctggatgaggagacctcatttgtcttgtctgagcctcagtccttctccctgtcaaatggggacagtgatcccagacatgagcagctctcccagggcaccctgaagacccttagtgagtaaatgtattttagagatgatgggccagaggagggtgagtgggaagagggaggaccagggaagctcctggtgaggaggagggatctgaggggggaccatcacgacaggagctctgggcggtgggaggggaactgaaccccgggaggcaagggctgccatggcaggggtggggtttcatggaaatgactcctggtgtccaggtggtccccatgtctggcttcccgaacccaagggcgtctgaacccaaagtcagcctagggctagctgaacggggtttgtgggcatcacagcagccctgcgaggtggggaggagtatcccccacggggcagctgaggctcagacagggcgaggacttgctcaaagtcacacagctaagaatattactaatgataagaataatgacgatgatggtgatgccaatgacacgaggcacctgccctgagccaggcgccgttttatgggctgctttatgtcataactcattcaagtcacagagatcctaggaggtggtttgccaggattgtaggtatcattctcagtgttcagatgaggagagtgaggagagagttaagtaacttgcctcacatcactcagtaagtatgtggtggagccaggatttgatcccaggcagtctggctccgggtctgggtcccctccaccctaccctccaatcccagccaccgcaggagtgcagctgtttcctctgaatgggcctgtaccaccctttcctatgcagccctggctatgtaatttgccctggctatataatttgcaaggcccagtacgaaatgaaaatatggggcccctggttcaaatattataaagaatttcaggccaggcatagtggctcatgcccttaatcccagcgctctgggaagctgaggcaggaggaccttgatctcggaagttcaagaccagctgggacaacatagtgagactcccatctctacaaaaaatttaaaaagtagctgggcatggtggcatgcgcctgtggtcccagctgttcaggaggctgaggtgggaggattgctagagccaaggagatcaaggctgcaatgagccatgatcgtagcactgtgctccagcctcgatgacagagagaccctgtctcaaacaaacaaacaaacaaacaaacaatttcagctagtgtcagcagagcattaaaccaagcactgggccattctaagcacagaaccctccagggcacacatacacccagaaaactgacctgtgcctaggttaccctggagactccaatagtgctccaagaggctgcttggtggtcatgcccattacccagagaggtgcttcattttgcccctggtcacacagcaagttagtggcagaaaagggatgtgaacctgggcctgccagaccccaaagccctctaacttgtgccaaaaatgtgtccccaattcttgaaggaaaaagagagctgtgggcttccagggcgactcccttcacatccgtggtatctgtctctccctgccccatgccaaggcccaggaggtgtgaatggctcccttctcctctgcaggcgctgaggatcacgcatcctgtgactctcccctgtcccccgccaccctctgaaccactggccaccatggctacttcaaagttgcccgtggtgcctggggaggaggaaaacaccatccttatggccaaggaaaggctggaggccctgcgcacagcctttgagtcgggtgacctcccccaggccgcctctcacctccaggagctgctggcctccacggaaagcatccgcctggaggtgggcgtcacgggcgagtcgggcgcgggcaagtcctccctcatcaatgccctgcgtggcctggaggccgaggaccctggcgcggctctcacgggcgtcatggagaccacgatgcaaccgtcgccctatccacacccacagttccctgacgtgaccctctgggacctgccaggagccggctctccaggctgcccggctgacaagtacctaaagcaggtagacttcagccgctatgacttcttcctgctggtctccccccgccgctgcggggccgtcgagacccgcctggccgctgagatcctgtgccagggcaagaagttctactttgtgcgcaccaaggtggacgaggacctggcggccacgcgcacccagcggccgtcgggcttcagagaggccgctgtcctgcaggagatccgagaccactgtgccgagcggctgcgggaggccggcgtggctgaccctcgcatcttcctggtgtccaacctctcgccggcccgctacgactttcccacgctggtgtccacctgggagcacgacctgccctcccaccggcgccacgctggcctgctgtcgctccccgacatctcgctggaggccttgcagaagaagaaggccatgcttcaagagcaagtcctcaagaccgccctggtgttgggcgtcatccaggccctgccggtcccagggctggcggccgcctacgatgatgcgttgctcatccactcactgcgtggctaccaccgcagctttggtctggacgacgactcgctggccaagctggccgagcaggtgggcaaacaggcaggtgacctgcgctcggtcatccgctccccactggccaacgaggtctcgcctgagactgtcctgcggctctattcccagtcgtccgacggcgccatgcgggtggcccgcgcctttgagaggggcatccctgtgtttgggacgctggtggctggcggcatcagctttggcgctgtctacaccatgctccagggctgcctcaacgagatggctgaggacgcccagcgtgtccgcatcaaggccctggaggatgacgagccgcagccggaggtcagcttggaagtggccagtgacaatggcgtggaaaaggggggctccggggagggaggtggggaggaagccccactctcaacctgcaggaagctcggcctccttcttaagtacattctggacagctggaagaaacacgactcagaagagaaataaagagtgcagccccgcccccctgcctcacccacaaactaagtcttaacaaaatccaaattaccaacaaaaaaggccgatgtggtgaatgtgagggctgcagttgcctggggggtgggtgtggagggagcctgtgtccctggcaggcaggggagccggcgtcctgggcagggcaaaggagggggcactggggaggggaggagggaggcaggtgggcccagggccaacaggggtgtagtgaaaggggacaggagtgccctggagagggaggttggagacatggatggtgggcccagggttccctggtggtgtctttctccctggtccccaagtggccaggaggaatttgtggggcacaggacagcagggccaagacaggagattgcatcctgctaaggtgctttctattttattttattttattattattattttttgagatggaatcttgctctgtcacccaggctggagtgcagtggcccgatctcggctcattgcagcttctgcctcccaggttcaagcaattctcctgcctcagcctcctaagtagctgggattataggtgagcaccaccaagcccagctaatttttttttttttttcgagactcagagcccaggctagagtgctgtggcacaatcttggctcattgcaacctccacctcccgagttcaagcaattctcctgcctcagcctcccaagtagctgggattacaggcacacgccaacacgtccagctaatttttgtatttttggtagagagggggtttcaccatgttggccaggctggtcttgaactcctgaccttggcctctcaaagtgctgggattacaggcgtgagccactgcacctggcccctgctaaggtactttagtttcaatctcatgtccgtgtctgagaacccagtgtaccaaagacagccccaggggcctgggatgagcacagtggtgtccagcaatggctaaacaggttggggagagtgggcatccgtgcctgcctgctgcctgggagccatggaggggtagggggtggcagggagagggaggccaggcggccacagggctcacctccgtgtggtgcttgagaagacagagaatggcatggtgagagagtgactggatgtttccatgaacatcggaggagagaggaggccgacgatgcaactccgtggcctagcatgagtcttactccagaaggagggcgggtgtgtctcagagcaggaaggcacatggtgttgagacatctggcgtgtctgtgattgggaagaatcctggtctctccatgattaaaaaaaattttttttagagacagggtcttgccctgtcgcccaggctggagtgcagtggcgtgatcacagctctcttcagccttgacttcttgattttgatgctgtgagtctaagattgtgactcatttgctgagtctggggtcacctgtctctgtgggattgggtcggggtgtgcgcgtgtgaatactgggacctgctgaaaggccctgggtcttaacgggagggcaactatgtgttgagctttctgaccagactggtcaatatggagaaaccccatctctattaaaaatacaaaaattagctggtgtggtggtgcctgcctatagtcccagctactagggaggctaaggcaggaaaatcgcttgagacctggaggcggaggttacagtgagctgagactgtgactccgcactccagcctgggtgacaagactctgcctcaaaaaaagaaaagaaaaaaaaaaagctaagtttagagattcatgtctacatttttatttttcactttgacacactcaaacctaactttcccctgctcaagaccaaattaaaaagtaaccataacaataaaagtcataacaatgcccagagtgtctgaggcatcaccaataataatactgagagtgtaaccacacgcaaggctaagtactttatattagctaacatttattcatcactgctaggtactcctggttcataacaccctggaaaagaagcttctcttactgtttacatttggcactgagagaatgattaagttgctcggccaggtgtggtggctcatgcctgtaatcccagcactttggaaggctgaggccggtggatcacctgaagtcaggagttcgagaccagcctgaccaacatggtgaaaccctgtctctactaaaaatacaaaaattagccaggcgtggtggcaggcacctgtaatcccagctacttgggaggctgaggcaggagaattgcttgaactggggaggcagatgttgcagtgagccaagactgtgccactgcactccagcctgggcgacagagcaagactctgtctgaaaaaaacgaacagaaaacttacccaggctgttgtagggaggtgtcaaccagtatttgcccaagcttctattatctaattatgacattgctggagaccatcaacaattaaaggattaggagcataaatatttttgcttttttttttttttttttttgtgagacaaggtctcactttgtcatcaggatggagtgcagtcacatgatatcagctcactgcaacctccacctcccgggttcaagcgattctccaacctcagcctcctgagttgctgggattataggcatgagccaccgtgcccggctaatttttttgtacttttagtagaaacggggtttcactgtgttggccaatctggtcttgaacacctggcttcaagtgatcctcctgctttggcctcccaaagtgctggggttacaggtatgaatgaccatgcccagcgtatttttgcatttagttaaattctggttttgggcagttttaagatctaatttcaatgtcttttctgtagactgcagtcacttttggggtgaaacagggaatctgaacatgtatgtctcaaagtttgactttgtggctgggcgcagggctcatacctgtaatcccagcacttagggagtccgaggcagcaggatcacttgagcccaggagttggagaccagcctaggcaacatggcgagaccctgtctctacaaaaaatacaaaaaactagccaggcatgtggcacgcgcctgtaggcctagctactcaggaggctgaggtgggaggatcacttgggcctcagaggtcaaggctgtaatgggccatgatcgtgccactgcactccagcctgggtgacagaatgagatcctatctcaaaaaaagaaaaaataggctgggcgcagtggctcacgcccgtaatcccagcattttgggaggccgaggtgggcggattacttgaggtcaggagttcaagaccagcccggccaacatggtgaaaccccatctccatctccactaaaaacacaaaaattagctgggcgtggtggcaggcacctgtaatcccagctacttgggaggctgaggcaggagaatcgcttgaacccagtgggcataagtggcagtgagccgagatcatgccactgcactccagcctgggcaaaaccccatctcaaaaataaataaataaataaatatgaaagatgtggatacagaagtcaatgccctttagtttggcagcacagggattggtgagaaggacttaatgtggctctttctggtaaggctggatagaattcttgcgtacgtgtcttttccaatagacaaagtcgccaggctgcagatcatggtgttgtaggtctttgtctcctatgattgtgctgtggaaagattgttctatcaaaatatgatttctatccattgctttattaatgcctttaccttagtaaggctttattaatattgaagtatgtctgttttgtttttttttgtttttttgtttttgttttgagacagtgtctccctctggtgcccaggctggagtacggtagcgggatcttggctcattgcaacctctgcctcccggttgaagtgatcgtcccgtctcagcatcccgagtagctgggactacaggtgcacacacaactacacccagctaatttttgtgtttttgtagagacagggttttgccatgttacccaagctggtctcgagctcctggactcaagcgatccccttgcttcagcctcccaaagtgttaggattttacgagtgtgagccactgcacccagatggatatgtctccttttatcaattaagggtcaaaagcagaggaggccaagtgcataggatggcctgtgactatttccaaaggtgaaagtttatgagccccaaagagagtggcccttagatttaataataccaaaggaggaacttaggtcaaggaaggtgtagataaattctgccaactgggttttttgtttttttgttttgaaatggagtctcactctatcacctaggctggagtgcagcggcttgatctcagctcactgcaacctctgtcccctgggtttgagcaattctcctgcctcagcctcccaagtagctgggattataggcgtgtaccaccacacctggctaatttttgtatttttaatagggatggggtttcaccatgttggccaggctggtcttgaactcctgatctcaagtgatctgcctgcctcagccttccaaagtgctggggttacaggggtgagctactgtgcccggccatccaactgggtttttatagttccccttgtttgttccactgagccagaagattggggattgtagacagtggaaatgctgagaaattggccaaactgaactcacttgttttattatatggccagtaaaatgggctcctgatcacgatgtacttcaaggggagttccctaggtgggaatactttttttccaggagaattttggccacagctgaagcagtggcttgtctaccaggaaagcctctacccaataggagaatgtgcaaactgttactagtacatatatatatatatatatatatatacacacacacacacacacacacacacacacacacacacggaagtgggtagttggataaaatccatttgccaaaccttgaagggcccattaggtagattaaaatgtccaggatcgggatgtacacattttcctgagttaaacttacggcaggtggcacaagtgccaaataggcttttttttttttttttggcagcttttttttttttttttttttttttttttgagagagggtctcattctgtcactcagactggagtgcaatggcacgatctccactcactgcagccttgatctcctaggctcaggtgactctcccacctcagcctccccagtagttgaaactacttattttgatatttttagtagagacacgatttccctatgttgcccaggctggtctcgaactcctggactcaagcaatccgcccccttcggcctcccagagtgctgggattacaggcccgagagccactgcacttggccagtacagcttcttttaatgtcactccccctaatattgtttcataaaacaatttgtaagttccccagtgggtcagattatgtactgtagttaagaatattgacttggagagaactggttatcaggccttaaacacagcttttttttttttttttttttttttttcaaatcattgaactagcagtgtgatctttccaattttgttcttccgtttctggtgcccaattttgtgcatctttggtaatcatttttagatcaccttttggtggctcttttagctgggcctcaagagagatttgaggaaccgaacctttaacagcagcatcctttgcggcattatcagccaagactgtttcctctagcttccgcagaggttaaccttgaatgtccgggagtttccataatagccaaggcagctggcagctggatggcatccagtaagtcccgtacataggatccatttttaatttgacctccagtggacgtgagtaaaccccttcatttccatagcagtccaaaatcaggagcaaccccaaaggcatatctactatctgtatagagtaacagattgccctttcacgaggaggccagcaagggcagtgagt[131 bp omitted]aaaccctgtctctactaaaaatacaaaaaaattagctgggcatggtggtgggtgcctgtaatcccagctactcgggaggctgaggcaggaaaattgcttgaatccagtgggcagaggttgcagtgagctgagattgcgccactgtactccagcttgggcaacagagcaagactccatctcaaaagaaaaaaaaaaaagtagccacaggtaaggggcggcttcagcaacttcgaaggaagtggtaactacatatcttacacagtttttaccattgtcatctttcagatacgatccatctatatccatagttcagccagttcagcattatctagcggaaattcttgtaaacattttttagggaatcaaaagatagtgtcaaacagtcatggagagctgtgtgcagtggctcacacctgtaatcccagcactttgggaggccaaggtgggtggatcacctgaggtcaagagttcgagaccagcatggccaacatatagtgaaaccccatctctattaaaaatacaaaaaattagccaggggtggtggcgggcacctgtaatcccagctactcgggagactgaggctggagaatcacttgaacccgggaggccagaggttgcagtgagccgagattgcgccactgcactccagcctgggcaacagagctagactccgtctcaaaaaaaaaaaaaaaacaacctgtgggcctatgcctgtattcccttaggctttcccatggtggttgtggattggctattttaaagaaaacacgcttgaagggggaacttatttacatcgctctgatgttgaccatcccatagggccatggtcagccactgtaggatgttgttggattttggattggtgagatgaggaacaagtgggctaaactgcaagccacaaggggaaggggaagttttactaggccaaggtgatgaggtttcgttgagtttcaaacaatgtatgtcaggcctaaaagtggatgccaaggcagcaagtatattgtaacacatttatgacaggcatgcagagggattggagaatgggtaactcagggtgaaaatactccctcccctgttctgctaagggtcaccacgttctgaagctggagaactaggggtcaggcaacccatggcaagtacagcccagccagccctcagccagttcaagatactgatgctgtcgtgagaggcagccagggctctgacggaggcccgcaagatggggaatctgccagcagttgctgccaagttgcaggccacactttgttcacgggagaatgcaggctgcacgctggcactaccaagggcacaggctcaggcaagttgacctgtcaatatcatgagaggctacgaaataaagaccctaactcagcctgcatggctgtgatagaaatggctgtggaccctacaccctacccgcacccacggtcatcatcagaccggccaggcataggcacgcccactttttaggctgacaagtacctccagcaggtgctgctggaccgttacatcctcattatcattgcatcagagcatttgaccaccggccatgcccagctggctcgcgagatcctgcagcagggcgtttctccttcctctgctccaagatggagtttgccacccccaaagctgccaccccagcaccttctctgaggagagtgggctcagccagatcctggatggctgtcaacagtagctggaaggtcagggacatgctctggggtactggtggcagagaaggagagcctggacccttgagatactgcccaccccttccccttcgtcttccagcagaggcccagagtgggaaaagaggtcacccccggtaccagcgcatgactgaactagactttgtagtgaaataatgctttttagctgccattccctaacagtcggcacttctcagtcactggtgatagagaccaatcgcttgcattaaggagaaagagtatgtattggctcatttatttgcaaagttagaggattgcaaaatgctatgtgcccaatgcagacctggcacctgtggatgatggtggcatttaacatttattgaggctcagcataggtcaggcactgatatggtttggatctgtgtccccaccagatctcatgtcaacttgtagtttgtagtcaccactgttggaggtggggcctggcgggagggacggcatcatgggggtggtttctcatggttcagcgccagccccttggtactgtcctcacaatagtgaatctgttgtaagagctcgtggtttcaaagtgtgtgccacctgccccctcttgctcctgctctgggcatgtgaagtacctgctcccagttcaccttccgccatgattgtaagtttcctgaggcctccccagaagccgagcagatgccagcaccatgcttctggttcagcctgcagaactctgagccaattaaaccccttttctttataaattacccagtctcaggtatttccttacagcaatgcaagaaccgactaaaacagacaccattatgaactcaattaatcaccacaacacccctaggaggtaggtacaatcatcaccttattttgcagacaaaacagatgcccagcaagctttagcaacttgtccaatgccacacaggtggtagatggcaaggctgggatctgaacataggcagcctggctgcagggctgacattcttaggccaagtgctgcgctcatgacaggcgcttgagcccaggcagctgccagcacaacatggcctgctccagtgtagaagctgattgagcggtgctcatgtttcctgcagtggagggtgagaaggataccaatgtattcctgtgtctgaattgaaaagcgtgagttccacctgctgggaatgatgaagggactggagagccacaagcagcaggcattcctggtggccaggcccatcttgcagcccatcctagagcagaaggcctccctgcagcagtatatctagctggtgtccacagtggcctgctggcagcatcagcctgagtcctctgctggatgtaaagggggtggcgggtgaccggtacatacttacccactgttcagaaggctactgccagtttgactcctctgtcaaactgcctcaacgagccagcccctgcacaaaaccctggaggtgggacagggcctttggaccaaggtcaccagatcaccacggtggtggtggtggaaacgctaggccggatttccagagtgcctcatttcacccatccgggcatcctggtcacctgcagcacctccttcaccaccatctaccggatgcttcacacgcccctggatttggcagccagggacaccaagagtgtgctgattcagaccttccttggcaacactgaccacaagatcacaggtgaatccaatcaacaatctcagccctgagctgggccagcaggaggtggtaggttagggctgggagggcacagttctctctgtccccagccttgtgctgaaaggggctgggatggaagaaactgaagctccaactctcctggactgagttgcatgctgtctggtgccgtcttgccttgggtctcccatctttctctggccgttgcccccaccacctttcctactctggcaaacccccaaatcaaccagcaggaagaccccctggggaagcaggggtggggatgagacttggggcagacattttgacaaggcagggaagagctgggttatctagctggagaggatggtcaggagggttctgtagagatcacgacagtggggcaaaggatttagaagcatttcggtaaaagggcagtgaatgtcacagctctgaagggcctcgaggatgatcttaaatgttggaataatggccagagaggggaggctccttgcctactacagtcggtcaggaagtggctgtgccagagcctgtgctgggcctcctgtctcccaggcctcagccctctgtagagactggcattctatccacttctggcctgaccttctctggccctgctgagtgctttcttcactgaccccccgccccccctcacttcagttgtttctcacaaggccctggatccccatggtatgaaacaccagggctgtatgggatgcttgaaagcaggaggaaaccagggagacaaatatgtgccacgggcggcagggggtgggggagggcaatggatgaacagactcagccagctggactggagctgactgctttactgaacgatggattaatttggggtggcgagaccaatttggagacatactttgggaaacctcaaactaagatcatgtactgtatttaactgagcagatgagggttggtactgtaccaaatcgcagagtggatttaactgagggtaggttctggatttacattaaaggtgagggttgccatttctaagcaagagtagatgaggtttacgagaggaaagccactgtatttaaccaacagaaggcactgtctgtacgggtgaggcatggtatttggattaagggtaagtacttactacatttaaggacaagttctgtttcttaagtcaaaagtaggctttttttttttttttgagacggagtctcgctctgttgcccaagctggagagtgcagtggcgtgatcttggctcactgcaacctctgcctcccgggttcaagcagttctcccacctcagcctcccaagtagctaggattacaggcgtgcgccaccacgcccagctaatttttttttgtatttttagtagagacagggtctcaccatgttggccaggctggtctcgaactcctgatctcaagtgatccgcctgcctcggcctcccaaagtgctaggattatagacgtgagccaccatgcccagcctaggcactgtatttaactgggcatttaacccaaaggcaggtaactgtctttaagtgagagcagaagacacgagggtagttgctgtactcagctgcaccagtgtattttcccatccaaaacatacacaggggaggcttgatgccaccccaggaaacagaataaccccttctagggacttcttagcagagactgatctccatctgcccgcaagggctgggtgtccaatttgtcctgcttcccagagctgcatggtgggtagaggagtaagtggaacataagaacaggcttgcatgactgtgtttatttgaaccaccagatctgttccaataaagagctctccagaccctgcctcaccttacagggaagggcttagagtcagggaagaggggcctgttgctcctgtccctgaaaaaggaggtcaagatggagcccgggcttcctggtgaccattcagactcctcccactgcttgtccctgtggaggacacaggacgggctaccccatctcaggtttggggtgggatcgctcacagtcacccccggaacagccccaactgagggtggggggcctggccctggacacctcatgtctctgggccgggaagccacgatccctcatccatcaggcctgctgccgctctccaccccagcgggggatggacatctgtgctccctcgcagtacactgcggacccaggaggtcccctgcatgacattcctctccttggcctcaggccagcaggcggctgtactctgccagagcagaggactttctcaccccatcccagatccgggcagcgtagtggaacctgtgaggaggccaacagtcagggctgcctggccggggctccccccagcccagcaccaacccgggacaggtggagaaactgaggccccttttatgacctgagatgtgactctgagcctcttggaacccaatctcctcgactgggatacagggaggatcctaacagtgatgggaggtggcccaacttttcttagctcacccaggttatgcaaagctgaaggttccagggcttggactaagacctcaagtctccaccacctaaacttctcccactccacacagtgctggctttgtgggtgagggttcagtttccacctccctccagagtcttacgacatagaaaacatctaacagcagctgcacaacccacaatcttctccctctctcctctgggtcctggtttagaccaatggcaggagcagagctgggactcaaagctctgccccatctctgccctacaagccctgaggggcttcctgctgctttgtctgcactcctgaccccttccaggcacagccaactgcaaacagatgtagggagccaagttagagaggctgcacccagttaagctatttatctttccaatttttctctttgaagtaagatgaggaagacctggactcatatgctgagagctctggacaaagaagtaatgtaaagtaggggccacagagctagtgccgggccaagtgaaagcagggagagaaagccagaggcaggaaacaagacaaatgcagaagtgtgaagaatgagaccctgatggcttcctggttcccatctgctgcagggccctgctttctgtgatcaggtccctggaataaatcttccttaagctaaatctggtcactggtcctactcctagcaatcaaatgactcctagccacagatgtgtggccttgctatgtaacacttttccccgagcctaaatttccccaccaggaaaactggtgacaaggacctacatgatgctggctgattaggaggattcaaagtcacaggaaacagcatgttgccacatgggtgagatgcttacaagacagtagcaatcatcactgttccagaaaaggaacctgggatctggagaggaggggcttcacaaggtcatgccgatctaagggacgcccccttctctctacaccagggtggggtgcctcaaattgaccccctctgcaaagagctcttaccagttcttctcggtgaggatcgtgtgtgacagctgtggccgggccatggacatcacttggctccggagcttgctcaccaaggactggaaactggggtggccacgatacccaggcagcagggagaagagtgggctggaaccaggtcctggaaagttggggcagggagggtaagagggatagactgccagggtctttctcccagttaacagcatcctgggcttcaaggagcacctgagagttcagccccggctgagctcttcctgtacttctatgactctgaaacacactcctaataaagggtccacacaccccaggaacaaaccaggatcttctctcagaccaggtaggctccacactgctcccaaaccagggcaacccatgtcgcctcctagaccagtgggtgctgggtctctctctgatcaggataggacttgtctctccatgaacctgttgagggtaactgtacctgctcttggtgggttttcactctctgcttcactgtccatgaagggtaccaggaataagttgacctcagagtccaggaagtcaggtggaagccccgggaagacattgcattgtaacatggacagagttcctggaggagaaaacgcttcagccttcaggtaccatgttgtgggtttggggagtgggaattgttgacagtcaaagcaggatcaggagactagtctgggggtagagactgacccacggggttggatcaggaattaggaggctgactagcttggggggtgatgtgggaacccttacccttgtaacgcaggtgggagtgggccatgagctggtcaatcatcaggtgcatctgccgcagcttccgaggacagaagtcctctcggcgagctttgttctgcaagaagactgagggtgggaagagacgggccctgtcaggcagacatcgcttggcttcatggactcccctttctcaccccaaagacctgttgttacccctgagttcagatcactgtgtaaatatttatataacttcacttcactttagcaccaggctctgtgtagggcaatgctggggacccagaagtgagtcaggtctgatttctgcccctagtctctttgaggccctagcgagggatcataaaatgaactgggtctttgaagaagagtagagcggagaaaggatgaaacaggcaaaggaacggcatgtgcaaaggctagaggagggagaacaggtggacggggccacccagatgaacccaacctaatactcacttcctgagttgggagattccagggacccagaaataggcagacctggggcctgtcccattccagacacaggctcaggggtcatgccctcaactgtcaggattggaccagggcagtgggaacttggaaggagcagctaatcctttttgactttgctcctcacaactctcaaaagtgctccacccagaaccccactccttcctctctctcccctcttctccagcgtgctcctgactttcagcccctcatttttcctcctgcccacccctccagtccccagaaagcctctcacctaggtgggggtagtactcggtgccttcatcggagcccgatgagctgctggactcgtggctgggggatggggtggagggcttcaccatctctgctgtctgcaggaaccttggggtttggggtgagtggctgttgctcttgcacttgcaccccaggtcccacagcctgggacaggggcttcctttgagattctgatgaaagctacagccatgctcagaaaaataccatatacacaccatgtttctcacaatttcagagaattcagagataatcctctcagataccaacccatggacttaccaactgtataaattctttgagtttactgtattttttttttaaaggctattttttagagcagttttaggttcacagcaaaactgagcagaaagcacgtagcgttcccacacaacccctgcacatgcacagcctccctgactatcaacatctccaacctgaatggttcatttaagatccatgaagctgcactgacacatcattatcacccaaaatccctagtttacatcagggatcactcttggtgctgtacgtcctacaggtttggacaaatgtataaaggtgtgtgtctgccattatagcatcacagagtagtttcactgccctaaaaatcctctgtgctgtccctattcatccctccctctctccaacccctgatctttttactgtctccgtagttctgccttatccagactgtctgtatagttggaattacaagtatatagcattttcagattggcttcacttgatctgcatctaatgatcctctatgtctttttatggtgagatagctcatttcttttcagtgctgaataatattccattgtctagatgtgccactgatgatttatccattcgatttactgaaagacatcttggttgtttccaagttttggcaattatggatacagctgctataaacatctgtgtggccgagcacggtggctaacgcctgtaatctcagcactttggggagctgaggcgggcagatcacctgaagtcaggagttcgagaccagcctggccaacatcgcgaaactgtgtctctactaaaaatacaaaaaatagccgggcatggtggcacacacctgtagtcccagctacttgggaagctgaggcagaagcacttgaacctaggaggcggagg[138 bp omitted]tttttacaataggttaagagtacataaacctgttttctaaggtaagggataatgggattgctaaaatacagggacattctcctcatacacacacaaacacatctacaatctcaaggggctcccctactctgagaagcccacctgtagacaagaccttaaaaacaaggctctgccatgtgccggcctgagccaatactcctaccagaatgtaaactccccaaggagttttatctgttttctctcttttatctgttttgttcacacctgtgtccctagtgcccagaacagtgcctggcacacctagatgtgaatgaatcccagatggtggtaggaataggtgtttcagaatgaagtcacagctcagctgcattagatctggtcagaacaaccaactccccagcaagccttttttgctgttggccagaccctcagctcatccctgtccccagggttactaatacaaacattaagttttctccatcaactgcttactatgtaacagggactaagctgaatgctttaaattccttaactcactgaatctacacaacataatgctgctgatgaggaactgaggaggaaacagacacatgcccagtaagagctaggattcaaaggcactacctagctctgaaggcatctgcttcctaattccatttctcccctccctataagctcctgtcccttccttctgcctggtccgtgtgcccaaagctgttccccccaacacctcccagcggtctcctggggcctgaagccaggaagagcccttgtggccataggttctgagccagtctcttctggaggcatttctgcaatctgtggctgcttcaggcaggactcctgccaggtcctgcctccctgagtaccaacaggagggcacacgagcctgaaggagatgaacagcaaaactccacggatcagacaagccagctcctcatgctccttattcagcaaatttgtagtaaatatttactgtgtgccaggcactgtgtgaggtgctggggaccttgccctcctagggcttacattcgaatgggggagaaagatcataaggaaagctacagtatcctattaaggagaggtaaatgcaatgaaggaaaacacagaagtgagggagagtaacaggggatgctatgttagatggtcagggaaggcctgaagttgactcgaatggcacgagggcgagagtctgaggagatctgcgggaagggtatttcccactgagggaggcggagtgcagaggtcctgggctgcaggaagaacagccatgaggccctgtggctttaataaagggagtgagggcaggtgcggtggctcacgcctataattccggcactttaggtggccgaggcaggtggatcacctgaggtcaggagttcaaaaccagcctagccaacatggtgaaacccatctctactaaagatgcaaaaattagctgggcatggtggtgggtgcctgtaatcccagctactcgggaggctgaggcag[136 bp omitted]aggcagtgagagaagtcagcaaggtgaccagagagcaaaggactttgtaagccatgcacgggcagactttggatttattctggtagatatgtaaagtcagtggagggctgtgtgtgcgcgcagtgctttgagggggaggttagatgggagtgatttgctccaacttacattttaaaaggatccctctggctgctgtcccttgagtcagtggctcaagtctctgggcctttgtctcctgcctcattcctcctccccaccctccaacccctcagctcctcacctgtagagactgaggtctgtgaaccagtcctggacaacaatcaccacatggcagaccgtgaaaaggaaggcagcaatctggagtgactgagggtgggcaggatggaagggaggtgaggacctcttctgcccagactaatcaggagtccctgatcccaggactcagttcaggaggcagcaaggcaaggagccttcaagcagctactgtgtgcccagcactgtgatggcacttcccttacaggccatccctaactcaggaaaggtgggaattatcacccccattttacacaggcagatgctgaggcgtcaaaggggagggggtgggaaatgacttgcctgaggggcagagccaggagttgagccagtcctgactctcagtgttgtcctcttcctatagcccttggggcagccagggctcttctgaagcagaaactaagtggaccacccacacccagctctccagatcttgggaggatgggggtggggatgtaaaacctcagtcctgggcctggcttggctccctcacctgcatttcaacgtaagtgtggggaaggttgtactctggaggcagtttgcggtcattattgatgagatggtctaggatagaagggctcaggatgggctgcagcaaggaagagaacagagtgtcactcagatacccaagtttcacacgctcaaggcaaatacattgtctatctcaggacaaaacaaggtcagaaacaaaggcaggcaatttctaattagaacagcaaaaggaagttaaagaaaaaaaactcaaagctgatacacttttccagctcctttacaaatcactgttgctcgcaagcacctcatgcccaaagagaagaaactgctttgtgctaatgaatttttaacgtttactcaaatgagtcatgtcccttaaaggctcattttgttgtcagttgtttcatacgctttcaaaactttgctaagataattacttaggtaaaaaaaaaaaataattagtgtgaaaactggtgagaattttaaaaactgcatcagtatgtataagaatcagtggtgagctcaccggacttttttttcttaaaggaacattcaatcaaaaaactttaagagctaaattaaattagcttgatagtctactggcttcttactgcagtgaaattcttttagaaaggggctttcacaactgctcgcgttctcaaactccaaacattgagcagtgctctattctgtcttgtttaacttccgtcctcctcttcacaggtctctgacccagaccacagccggtttggtttgtctccaggtctccatggcccctgcacagggcctggcacacaaggctcacatcacatttgtagattttccactctgtgtcatcaatgccacagtgaccagaactctgttccaccaactatgagtgccaactaaagggccaggccctgtgccccagctctcacccccagagccagggctctgctctgaagagcttcgggcaggcagggagtgggaacagacacggtggcaaatcacatgctatggtgggaggtgcatatgggcaacagtggaaggggagggcttctgagaggaggccacaccccagtggagtcttgaggaagaagaaggcgttagccaggcaaaaacgcaaggcgagagcctattgtactgataatggtattaattgctaagggtatttagcacctaactcctgttgggtgctgtcattaggactttacttgcatcgatgcactgaaacctcacaaaacccctatgaggcaggcagtattgtttttcccacttaaaactgaggaatgaaaataaataacttgacaaggtcacacaattcgttggtggtttcaggtaaaaacgggatatgcgaagtccagagaagagagagatcagtgtgtgtgtgctgggggtctggtggctcctccagaggcgaggataggcagtctgagggaggcaagccacaccctccgaatgccagcttaaggaatctggactttgcctgagaggaagggagaagccgaggaaaactgccaggtaaacgcaggaccagtcagtgctaacgacagtgacgagcctgagcactaaccttgtgccaggtcctggccaagcactttgcctggattgttccactgaatccttgaaactcctaagaggctaagtacagttaccatccctatttacagataaagagctgtggtttaagggagtttaaaactgaaagtcacccagctggtaagaactaacagacaggatcagaacacacattctccagggcccacacttttcagcactatactagaaatcctttaggctactgtgtagaaggcgaatgagatgggggcaaaagtgacaagagactaagggccaagaaaagacacaatttgccccagggcagccagtatgtccatggcttgactggaagcacatggaatccacgcagggttctggcttaatcacattccaggaagaggctcaatgcaggatgtggcagggtggggcaaaggcaggcggggctggcacctgtgtgtccaggaaaacaatccgttcttgggtaataaagaagtcgatgccactggtctggttgccccctcgttccttcatttcagcgctctgggcccggaaaacataagtcctgtggagaggagcaggcaggggtgtgtgagagctctggttctcagccttggatgcatccgaagtgtgaccctgtgagctgagcatgtgagccgtggtgccctgcctgctccctaagcttttcatctgtggcccatgtcagggggtgggaggcgggggtagtgcatgttttgaagcacacaatttcactcctatccataaagagatccattagttcaattaatgaagccagtacactgaggtgttgaagggcagagactccgccagtctgccaggattcagatcccagctctgcctcttcctggctgtgtggctttaggcacactccttaacctttttccatcagtttcctcatctataaaacggggataaccacatgatcaaaactctgtgtattactgtgaggtcggtatgtgtaaagcccttagaatggtgcctgatatataatgatatatacttttagctgttaattatcaaataaacctactagatcccaggcattggagagagagcactgagtgccctccactcccacagtgagagagagtttgggtcttgttcccagcatcttcccctgtcaggtgagtctccctcacttctacgtgtgctgggtgctgggaatatgagggcaaagcaggcagagcagggccgtgccctaaaccactaagttcaacttggtgactctgtgacttgggcaaagtgattttaccttttgaaatctgtaaaatcagggtaatagtacctacctctcaaggggtaatttctatctcccctcaagatgcataatctgttgtctgacacaaagcaggcatccttccactttacaaacactatacggaaaacctcctatttgccagataccaggatatagcagtgaacaaaaaagactaagtcggcttctgtgaagcttctggtctagtttacaaattaccagaaatcagtaactgtgggtgttagaaagaagaggcgtgcagtgctccaagtgcagattgcttagttggtggagccagaaagggctgccctggagagggaaatgacaatgctgagggtgagagagaaagagggagttaattggcactgggtgggggatggacgcagaggaaggttgcatcggcagaaagtaggtggcttgttgtactaggactcaaagaccagcatggcaagagcagaaagatggtgcatgtgggaggggagggagcaagaagaggatacacagacccttgtggagcatggtaaggctttggcctatgagcctggagaagctgctggagagatgtaagtagaggagtgacaggatcagactgtggtttgaaaggtccccttgctgctatgtggtgaggaccgtacggtggaaaaagtggagataggcttacaaggcccagtgccagagtgcctcgctctgcctctctggccttatctcctaccactccccttctaaggctgccacgttcttctacacacactatgggcaagctcccacttcagacgcattgcccatgccagtccctttcactggaatgctcctcccagcatgctttttctcaaacgttccccttagcaaggccttccctcaccatcctatttaaaactataacctagtctgggcaacacagcaagacctcatctctacaaaaaataaaaaaaaatattaagggcatggtcgctcatgcctgtaatcccagagctttgggaggccaaggtgggaggatcacttgaggtcaggagttcaagaccagcttggccaacatggtgaaaccctgtctctattaaaaatacaaaaattagccggatgtggtggtgcacgcctgtaatcccagctactcgggaggctgaggcaggagaattgcctaaacctaggagatagaggttgcagtaagccaagatggagccactgcactccaccctgggtgacaaagcgacaattgtctcaaaaataaaaaataaataaattagccaggcatggtggtacacaaatgtagtcctagctactcagaaggctggggtcaaaggatcacgtgagcccagtctgggcaacacagtgagatcctgtctctacaaaaaattaaaaaattagttgggcatggtggtgcatacctgtggttcccagctactcatatggccaaggtgggaggatggcttgggcccaggtcaaggctgcagtgaagccatgatcaggccactacactccagcctgggtgacagagcaagaccctcgtctcttaaaaaatagtaataatttttaaaacctgtaacctaggcccaacattacctccctataacccttttccattgtgttatattctaacgtgccgaatagtgtgtttattttgtttactatcttccctattaaaatataagtcccacaagggcagattttttccagttttgtataccactgtatccccagcacctagaacagtgcctggcgcatagtaagcaattaatacagtacttgtcaaaactgaattaaatcaggcagaccagacagaaacctcttggtatcctgcatgtaagataataatggcttggactaaggaggtgggagtgaaggagggaagaaacagatgaattagaaagagaattagcaggaaggccaggcacggtggctcacacctgtaatcccgacactttgggaggccgaggtgggcagatcacctgtcaggagttcaagaccagcctggtaaacatggcgaaaccccatccctactaaaaatataaaaataagctgggcatggtagtcccagctactcgggaggctgaggcacaagaatcggttgaacccaggagatggagattgtgttaagctgaaattgtgccaccgccctccagcctgggtgacagagcgagactgtctcaaaaaaaaaaagagagagagagaattaggaggcaaaacctagacctgatgaaaagagttgatactgaagtctaccacaccacaggctgacgtggctcaaaaagacaagctgggtgacaggattctccctacctcaggaatctgaactgagacccatggggaaaatttgctagttggggtgaaaagctgaaatggaaagaatgttatctaagacctggaactattccaaaatggaaccaaactgagtcatgagtgagcagagaagaggagggagagaggcagaggaacctcacagctccagctttatgggatgtgtattcgcccaacagtggtcttcaccttttctagatctccatcagcccactctgagatctggtgcaaactagggaccttttccctagaagaaaagcctgactgcaaatgtgtgtaaaattctgcatacggccaacggtggtggctcacacctgtaatcccagcactttgagaggccaaagcgggaggattgcttgagcccaagagtttgagaccagcctgggcaacagaggaagacgccatctctaccaaaaaagttaaaaaccagctggtgtggtggcatgcccctgtagtcccagctacttgggaggctgaagtgggaagatcacttgagcctgggaggtagaggatgcagtgggctatgatcgtgccattgcacttgagcctgggtgaaagaacaggacactgtctcaaaaataaatgaataaataaaattctgcatatactgttaagggattaatggactcctgacgctcatccatggaggccagggtagtatcacctgctttacaaaaaaacagatccctgtatttttaggtaacttcaacatgtctctgttcttcaccaccccagtggctactatccattctcattccccattttgattctcccttaatgagatgtgtatctcccccattcccaaattcctacatttttccctttccttctctgcccccagtttcgggacctgtttctcaagttctcccctccccaaaacctgctcctgtgcccttatgctttatcttcataatcacattccatccttactcaagaatgttgttcaggccagagaatcctcatgtctgatcctccccagcctggagaagcagagccattttcccaaggtgacacagtaggactgaggctggtacagaaaccactctctgtctccagatctctttccccactctatttctcagatcgtatcagctaccattctgtgatacttgctctatgccaggtgctcattaacttttgccttcttgatcttattttattctccaaaaatctacctggacaggggatacgggaaatgaagtgacctgcccaaggtcaaccagttatgttgcagggctgagcctgaggtgggcccaaatccaaaaccttaacaactacatcatcccacttcttgtctaggacctgtaccatttcctgaggccaggcaggaagggagggagggagggaggaacaggattggatgccttggagctacacagatttagtccagcccattatcatcttcatctcatgaagacactgaggtctacagaagaaaagcaactttccaaagtcctttggtaacaccacttgaaacacccaagcccaccttgcccctgctcccagtgggtgcccacctccctcctgcaccctatctgatagcccctcacctctggtcctcctctggagtgttggctgacaacaatgacatgaccatggacttgcctgtcccctggaggcccaggacaccaaccaccaacacatcagtctgatccaacaggtactgtgggaaaatacataaatgactctgacaagtctgtcagctgctggagctggaatgagggggggactccagagacccttgtggctcccccacctgccttatcatatatgaagagaaactcctatagtcccaaccccttcaactaggcatagggcctctgttccgtgtcatggtaggattatgtgaaatgttttagacacaaacaacagtgtctgtgagaactctgaagtagaaaagagcctagcatggtcaagaagctaaaaggaagtcagtgtggctgaacacagcgggaaaaagggaagtctgatcttggagaagtgaaagtgagagtcacaggaacagaagggcaggttggagaagataggactcggcgactgagggctactggcacagattcctggcaaacctgggaaagcacatgaaagggagtggtgtgcaaacaggagccacccaggctttcgtctgtgtgtgtgtttttttgtttttttttacattcatatgctgttgtctgtgggatttaagagcccctctggaaattaactgagaccaactctgggccaccagctctgctgactttcaccaccagggggtgtaagagacactcctcaaggaaaacagctacgttctgaactgtggctgctgctccttagaattaccttaaaattttgttttgttttgttttttaaaagcgaatcctataggccaggtgttgtggcccacgcctgtaatcccagcactttaggaggccaaggtgggaggatcgcttgaggccaggagttcaagaccagcctggccaacatggtgaaactccgtctctaccaaaaatacaaaacccggctgggtgcagtggctcacacctttaatcccagcactttgggaggccgaggcaggcggatcacctgaggtcgggagttacagaccagcctgaccaacatggagaaaccccatctctactaaaaatacaaaattagttgggtgtggtggtacatgcctgtaatcccagctactcggaaggctgaggcaggagaattgcttgaacccgggaggcgggggttgcggtgagccgagatcgtgccattgcactccagcctgggcaacaggagcgaaattccatcacaaaaaaacaaaaaaaaaaacaactatctgcgcgtgatgtcgcacacttgtggtcccagctacctgggaagctgaggctggagaactgcttgaacccgggaggtggaggttgcagtgagccgagatggtgccactgcactccagcctaggcaacagagcgagaccgtctcctaaataaataaagcaaatcctgggcccaatcaggatttaacgtgctttaacacattaaagcagaatatctatggatgccctgttcaatcagtaggcattgatcatacatggctatttaaattagtaagcttaaacaacattaaaaattctgtttggttgtactagccacatttcaagtgctctaaagccacatctggggatagcggctaccatactggacggatagttcaaatatatatgatcttcatcactgcagaaagttttccttaatagcgctgaagggtagggtttggttttttgttgttgttctgttttttgtttttttaaagctccccagttaattccaatgtgagagtggacacagaagtggcaggggcaaggcaataaatggacttgaggctgtgctaataagtccaggctgctgggtaggagaggtgacacctctgggacaatctgagcaggggtgtgacaggtctaggggagaaaaagcagaagaagggacacaacatctgggagactggtgttatgtatgatgatctaggaatgtgaggtctgaactagagcagggggtggtgggatggatgggggtcactttgggggagtgacattcaaaacagttgacactgagacagcgtgggcttcttgttctttttttttttttttttactgagacagggtctcactctgttgttgaggttggagtgcaatgtcatgatcacagctctctgcagccttgacctcctggagtcaagtgatcctcttacctcagcctcctgagtggcctggatgcctcctgccaccatgcctggctaatttttaaatttttggtagaaatggagtattcctatgttgcccaggctggtcttgaactcctgggcttaggtgattctcctaccttggcctcccaaagtgctgggattacaggcatgagccaccagcaagggtttcaaccaaataagaagggtactggagcagggtccaaaagactcccctgctgtggatggcacgggagatcccaggggtcctggggtggtagtgagagtacttctttaccaatcggtaccaaaggagttctgtattttaccaactagcaagcacagccgagctagttgaaattccgctctggttaggtgagaatgttctgataccaccccctctcactgctgtaagttgcctcaaaaccctccagtctggtgttgcctacagagaggtggaagatcagaggatgcaggatgtgcggaagctcaggcagggcaggacccctcggtacctcgatggcactgtcacaccaattcatctggtcatccaccaacttgatgctgtgcttcatgcgctctgggggcagtagtttggcctgacccacgacagctggagattggagaaagcaggagacagaggatgcagtgaggatctgtgaggagacgccagttcccaacctggtactgcccagccccaactcacggtccatggctgctggtgcggcagtgcccatgccccggttctggatctggtacacaggctgtgtgggtctctgcccctccttctcccccttgggtggcgcaggggctgcagggggtggtggggcggtgccctcaggggtagaggcacctgtcacggccacaggccccttcccctcctcccgtggcttcatgagaacgatgggcttctccagaggggctggagcaggcggggcagcaggggctgttggaggtggtggctgttttgactacggaggtaaaaaaaatcccatcaatgggggcaatcccttccctaacggctccccctcctccctccttctctgctcacccgctctgctggaggttttgagaggatgatgggggttttctgcatgacggaagtgcttgtctcttcgctggcatcctgtggtgagggagggcagttactcatgaatggctctcctggacattccagatctttatgtaccatgaactattctaaatgccgaaatatattaactaccttgatcctaccaacagccctgtgagatagatactattattacccccactttacagatgaagaaaatgaagcctagaaaggttaagcagattgcccaaagtcacaaagcccaggcagcctggctgcagaaccaaatcctcaagcattctgctcagctgcctctgcgaggcaacaagcccaggaggaaaggaactaggagctagacaggtctgggtgcaaacctgatcccgcctcgtgttggctgtgtgaacttgaataaggaaccaccctcgccaccttcacttatgcctcattttcccatctgtgagtgggtatgggaattccttcctcacagactatgatgaggatgaaaggagagagaactcatcaagtgtctagcatggcacctgacacatggcaggtgctcactatgtgagagctgctggtggcacttgctatcctgatcacctctgcctcagccccctcctgctctggcaaagctggcaggctgatcccaagccttgacctcttcatgcctccccaacttaccctcagtctgctgaagaggggagaaatctgagtctgagtcccgttctttctctggttccttgagtaacctcatgagagtcttgacccctaactgtgtctgttccttcaccaatatactgaggacacttacttaaaccctgctcacttcactggcttacggtgaagaacaaacaaaaagacgaagtgaaagtgcttcgaaaagaagtttcaagggaaaaactacaggaggagaggctgtggacttccaggaggctaggaagggggagatgatacaggctgagtatctcttatctcagatgcctgggaccagaagtgttctgaatttgggatttttttgaactttggaatatttgcatatttactggttgagcaccccaaatccatttgcaaggctccaataaacatttcccttaaatgtcacgttggtgctcaaaacatttggaattttggagcacttcggatattcagtctatacctgggatgaacgctgtgagggtagagagaagacacacagatataaccaggcggcagaatgtaaagcactggtgcctgactagcacagaggaagcaggggagaggcgagagaggcattcaggataaggcccaatgggctgtcactgatatgggagaaaaaaatgggaagaggaaaaatggcagaaagatgccgaggtcagcacgggacacagaggataagaagcccatgggtgtgacaagaggctgccagggctcagtagcacatttagagacaaagatgaggtttaggaggtgcttgttcaaggattaaacctgaaggtgtggcgggataacattccccaggagggcattatgtggaaggaagagagactacgtgttctcatttacactgtggcccaagagaaggagcaagtaagagcccagctcactgtgaaaaaactattcttcatgtttgtacagttttatagctcagaagctggccccagttgtcacctacttccaccctacctgacatctctgaggtggacagggccctagagaaaaaagcccagggggcaggttctggcagtgagtcacctaggtacaggaggggagcgaggctgggcctgggcacaagccgatccctcctgattcccagcccagggcgctctctacagcaggcagagcgatgctatatgtgagactaagctggacctggatctgagtcctggacccaaagtttattgactctgattttggaaaagtcccttcacctctggggctcattttcctcattagtgaaaatcagatctatcatagaatctacctcatggggtagctgtaagggttcaggaagacccaaaggatgtaaaagactttgcacagtgcaagcacagtataggctgctcagtaaaaagagtaacagttgttgttattatgacatgaccctttaaaacatgagctatggcacctctcagctcaaactctccaatgccaatttcactcagtgaaatacaaagttctttccaaggcctaccaggtcctacatgatttggccccagttacttgacttcatctcctatctctctccctccttcctcatcaattgcagccatcctggcctcctatggctactccttgaacacgccagatatgggccacctcagggcctctgcgcttgctgttctttctgtctggaatgctcttcatctcagatgctggcatggcttattctctcatctccttcaagtctctgctaaaaagtcacctcttcagagagaccttctctgaccatgttatctagaacagtctcctttatcactctccaccttctttatccatgagggtggtaggttttgtttacaaatatatccccggcatctggattagtgcctggcacatggcaggtgcgtggaaccaaatagatacatgaatgctgctcctgggtccagacactcacccttctctctctttcccatggtgcaatgtagtccctctcccgaccaccaggcccagagagattctgggggccaccagagccaggctccttccaccgtcgccgccgctctatcccatagagtccaggctgactgtgtccagactcagacatggttacctatggagggaatgaggggatttcaggatgacagagtctcttcctactctacttggcatatcctagactatacgaagtcccttctttcttttttttggagatggagtctctctgtcgcccaggctggagtacagtggcctgatcttggctcactgcaacctctgcctcctgagttcaagcaattcttctgcctcagcctcccaagtagctgggattacaggcacccaccaccatgcctggctaatttttatatttttagtagagatggggtttcaccatgttggccaggctggtctcgaactcctgacctcaggtgatgcacctaccttggcctcccaaagtgctgggattacagatgtgagccactgtgcccaaccaaggctcttcctttcttcttttttttgagacagagtttcgctcttgtcaccgaggctggagtgcaatggcgtaatctcggctcactgcagcctccacctcacagattcaagcaattctcctgcctcagtctcctgagaagctgggattacagatgcccaccaccacacccgactaattttttttgtatttttagtagagatggggtttcaccatgttggccaggctggtctcaaactcctgacctcaggcaatccacctgcctcagcctcccaaagggctgggattataggcgtgagccaccatgcccggccaaggcccttcctttcaacagagctctgggcctgtggtagcaactgcaagctggttcccaacatccactcctgacttcttccaaaaaagtaaaaccctcagttctgagctaggtacatggctatccagaacaaacttctcatccttgtttgcagttaggtgtggccatgtgagtaagtactttctggctatggtatgacactagaagtgtggcttggcagcttccagaaacttcccttcacagactctggcacatgccttctgccccttcctcccagtgacaggaatgtgggtgtggaggttggagctcaagcagctatcctgggctgtaaggcaatttaatggaaggtacaataaaacaagacacaaggttggggggttccacgttaaccttgaattgcctacttcgagaggcagtgaaaaacaaatacacatctatctcttacttgcagccaaaactattcccaactattaaaatgctccaacataaataaactcacaggggcaagttcacataaaaataggatattctccttaccaaaatgcagcaaggcatttgcttacaaaccagcaatgtgatcctcagtccaacagctactcttgattagtcattactagtgtatgtcatggtggggctccagccacttactagtgtatgtcatggtgaggttccaacactcaagggcctattttcacctggtatcccactacatttcagtgtctgtctgtcttccgttcctgacggtctgccttccctcacagtgaatttcatttcaaggtgtctccagtgtttattctatttgagatgttatataatgtctggctacctatgcaacccactctccaccatttcagtatctgtttacaggtccttagagagttttcccagctgttcacacatcagtctagggtggtatttgactacttaactgtttgtagaactcagtggggctatctgctcaagctcagaagtcaggttgacaaagtgtggcctaggggccaaatctggtctgctttctgtttttgtaaatagaaagttttatcggaacatggccacatccatcaatttagaaactgtctgtggctgccttcttgatgcaatggcagagctgagacagacaatacagtctgcagggcctaaaataattattctctggccttaacagaaagttttactgaatggccgagtatggtggctcacacctgtaatcccgacactttgggaggccgagacaggaggactgcttcagcccaggagttcgagaccagcttgggcaacatagcaagatcctgtctctatataacatttaaaaaagaaaaaagtagctgggcgtggtgacatgcacctgtagtcccagctacttgggaggctgaggtggtgggatcacttgagcctgggaggtcaaggctgccatgatcatgctgcaccactgcactctagcctgggtaacaaagcaagaccctgtctaaaaaaaaaaaaaagcagaaccctgtctcaaaaaaacagtttgctgacccttgcttagcttggaagtatctgttaaatccctccatgaatcctcccctgccccacctcataatgacataaacaggtccctccgagactctccagaatggaagggtctgtttacaagatgcagtcataattttgctagccagacaagtggcttgtctagctcctctcctactgtgctacatgacctctcccagagccacaagccaggctgaagactgctttcctagacagaggaggacaagggcctgtttacagctgcttagggaaaatgactcattccataccgaaatgactgcttagtctgggatggagattctccccagaatctgagactcctccctcacttgcaattaagtgtctttacacattattctgaaatctacccagtgcttaagtacttgtcttcatgcctcaattgggatactgcccagccctgaggtttctgtttactggcctatgaggatgccctttcctgtgcaaagtaagcgcccctgtgtgaatgcttttcttttttttttttttttttttttgagacggtcttgctctgttgcccaggctggagtgcagtggcacgatctcagctggctgcggcctctgcctcccgggttcaggcaattctcctgcctcagcctcccaagtaggtgggattacaggtgcataccaccaggccgggctaagttttgcattttcagtagagacggggtttcgccatgttggccaggctggtatcgaactcctggcctcaagtgattcgccagcctcggtctcccaaagtgatcggattccccgggtaagccaccgcacctggcctccctgtgccctttattctgggagcttccacagtatctgaatgtggggagttccttggaac[138 bp omitted]tccaatgctgtttccgggctcctttggggattacccccaaacttaggaaagctggtctatttaagtgtctgctgatggacttctagggtgacttcccgaaaattaacaaatcgaatttacatatttttggggagtgtctcctcagtatttaggcatcgcttcacacactcccttcggggatctcccagaacctcactatttgcaaatatttggggagactctcccgattcctgagtatgtaagcccacttcgtggggcactccccagcccagaactgtagtcgatttgcacattttcctaaggactccctaggatttaaacttctctctacggggttctagaagggagcctcccccggatttaggcattgctttacaaagcttccctcggggaacccaactcaagtttctcgttacacgttattggggcggcctccccagtacttgacgggcagtttgcaggctgtacttggatctcgcagagcataagtttctcatttacacgttatttccgtcccccgcccccattcctgccaacccagtatcgaattgacggtcgccggccccctactcagtgccgcacccccgccggacgtcccagcgacctttcaatggccaaggcgggggcggggcctgccggagcgccccgcccgccgccggtgcgctagcctcgcgcgggctcgcggcccccttacctaacgcggctgctgattggttctcggggcgcggtgtgcgctctcccgtgacgggagtcgggtgggggcggggaggctgacccaagccacccgcctgcaaatggcgtctgggggccaggaacgtgggaaggagagaaaatgggcactccccactccgaaaccggcctcggcgtccgggttgcagcccctaaggaaagctgggccgaaggaagaagaggaggaggatgtaacgcgggcccgagctgagatcagttccctcaggcgactcgtcctgcgcatgcgctgagggctggagctcgagaactgaatgcgctcgccgggctgagcgtgcgtggatggaggcggtcggcttcagcacgcatgcgggttccggagcgggaggcgggaggacgccgcggctctgactcaatgcgcgtgcgcgcggttggggggttgagggtggggagatgagtagggaaatggatacgccgaggagccggcaggagggagagcggcccggatctggggttcgagttgtgcctcttcggtgatgttggcgggatgcagtggggtgggacgacagggaggaatttcactgttctgggctgagtgccaagaacacatgaatgaatcagacttggcgtgcgccctggaagacaccccggcctgtggagagactgccagggcctcaaatcacttaggaaagggcgcgggtccggttggaccttgaaggacaggcaggcgagggtactccagggaacagctaagcaaaggcggcgaagaccccgggggaagaggtctagactggcttggattcagggtccacctgggtgggaggtgaggcagcagaatgggcaggtcagaccctgaagggtctccagtgtcagttttatccttaaggcctgggagatgcagaatagtctgagacagaactatgtttaaaaccctcgaaggccgcgttggagaagggaatccgctccagggtcgaaaatttaaacacacgtgggcggagtcttgcgcgcgccaaagaggaacattgggcgacgggcgcggcctggagagcgcatgcgcattcggaagggtcggcagttccccagtgggcagagtgggtggatgggaaggttctagctttttatttgaaattttatttatttttattttatttatttatttagagacggagtctcgccctgtcacccaggctggcgtgcagtggcgagatctcggatcactgccgtctccacctcctgaaattcaagcgattctcctgcctcagcctcccaaatagctgggattacaggcgtccaccacgcctggctaattttttgtatttttagtagagactgggttttgccatgttggccaggctggtctcgaactcctgacctcaagtgatccgcccgcctcggcctcctaaagtgctaggatgacaggcgtgagccaccgtggctggtctaaaaaaaagttttttaaaattatatttgaacaggtattacatgtacatacacaattcaaacctctctggctgtatacaataaaagtaagtttccacctctggttcccattttcctttcctaaagcactggttcccggtttccttctggagctgctgttataataaagcattggagttaagagcatgtgttgagttcatataaatagcggctgagcttgaccaagtgacttaatactctctacttctacgtccctgtttgtgaattgggtgtggtataaccttacttacaacattgccgccagcattaaatgggtgagagtgcatagaacagtgcctgttgcctaatggtactgtgtgttgtctctgtgtattattttgtggtctaccatgctgatagttgtagattctgagcagccctctcccctccaggcctcatccctactgtcattgtcccagtaccagtaccaggtggagccacctctccaggctgccacaggtagaaacaccagtcacccagaatgacttgagtccactgttgatggattctggggaaagattctgggtgtttgataaagatacacatgacaggccatctctgtattatgtctatcagtgtccaattttacttcttcagctcaggccatatctgaatttctcaaccccagatcactcacgattgccagtttcacgtcagggcaaccctcagaggtagaattttcttaaaagagggaaagaggaggcctggcattgaccttggacccactgtgtaccaggctgtgtgctctctgctttatatacatcactataatcttctcccctaatttgtttaacagatgttggtccgcgcagtgactcacgcttgtaatctcagcactttgggaggccgaggcaggcagatcacctgaggtcaggagttcaagaccagcctggccaacatagcgaaaccccatctctactaaaagtacaaaaattagccgggtgtggtggcatgcgcctgtaatgccagctgctcgggaggccgaggcacgagaatcacttgaacccaggaggtggaggttgc[134 bp omitted]cccataggcaggaagcagcagggcctggattcaaacccgggcctggattcaaacccaagcctgtctcactccagagcaagcctacactttttccctggcaccggggagccagcctggtgatgagtcagcagtacagtcaggcacccagtgagctgccttttgtattagtggcatggtatgctgttctggagatatatcatactttaacactttctctgttgatgagcatttagactgttgctgaacttctgctcttacaaacatttactgcaggggtttgtgtgtatgtttctgttttctaattttttctttttcagacatgttcttgctgtctcgcccaggctggagtcatgtaatacagttgtggctcactgcagcctcaacctcctgggcttaagcaatcctcccacctcagcctgaggagtagctgggaccacaggcatgtgctaccacacccagctaattttctattttttgtagagacggggtttcactatgttgcccaggctgtctcaaactcctggctcaagcagtcctcctgcctcagcctcccaaagtgctgagattatgctacagttaatatcctggtacacgtggctgcatgtatatgttagtattgtcagtagactatctcatttgaagtgcaagtagaattgctgggtcaaagggtatgcacattgggaattttgagagccattgccaaatgatctgttcatgtctttattttttgtttttgagacagggtctccctctgtcacccaggctggagtacagtggcatgatcatagctcactgcagcctcagcttcccaggttcaagcaattctcctgtctcagcctcccgagtagctgagactacaggcatgtgccaccacacccggctaatttttgtatttcttgtagagacagagtttcaccatgttgccgaggctggcctcaatcaatccttccacctcagcttcccaaagtgctgggactacaggtgtgagccactgcgcctggccctgttcatctctttttcactttttgttcatttctttcatttatatgttgaatgaattatggaactctagtcatctgccaggcacagctgtaggctggagatcctgtaatgaataggaaaagcacctgccctttgggagcagatattctagtggggcagatgacatcagataaaggatgcttggaagaaaagaaaatcgggggtgaggattgggaagacattgcaaaggatacaaaatttcatttagacaggaggaataaattcaagagatccagtccacaacatggtaactatagttagtaacaatgtatacttgaaaattgctaagaggataaattttcagtgtcctcaccacaaaaatgataaatatgtgaaataatgcatatgttaattagcttgatttagccattgtacaatgtataaatatacaaaacatgttgtacaccataaat[221 bp omitted]gaggcaggagaatgacatgaacctgggag[136 bp omitted]gccagggaaggccgctttgaggggatgacatttgatcagaggcctgaatgcagttaaggaaggtcaggaaatgagccatctaaagatgctgaagaacggccagtaaaagaccccaaagtgggagtgggcctggctgtccaaggatggtcaaggtggccagagtggctgaaacagagcaagggagggaaagaagggcaggattatttagagacggagctgtagacagggccagtttacataaagtcttacaggccatggtaagcatttggaatttacttccaaatgtaacaaagccattgcagggctacaaacaagcaccggcttgttccaattaatgtttacaaagacttctccagtgaacaacaaaaattaacagtgattgcctatagggatgagggttatagacagatgtgggtcagggctatgggaacttaaaaagcgttgttgtttttttaaaccacgtaattattagctatgcgcaaaaatgttcagtgaaaacagtgctggttgctgtgaggagaatggcctgcaggggcggaagcaggagatgagaaagctggtgtccttgcctgggcaagaaaggatagtggttctggaagagggtggtgctaatagatgagttgagaagggtcaggaactgggatcttttttgaaggtagcgccaagaaattaaacatggggtgtgagaggaagcatgaatcaggggtgacttgaaagtcatcctagagatctgttgtacaacagggtgactctcattcataacaatgtgttatatgcttgaaacttactaaaataatagattttaagttttctcacaccacaaaaaaataagtatgtgaaataatgcatatgttaattagcttgatttagccattccacaatgtgtacatatattaaaacatcatgttatttgcagcattaaaaaaagttctagcggggaggggggagggatagcattaggagatatacctaatgctaaatgacgagttaatgggtgcagcacaccagcatggcacatgtatacatatgtaacaaacctgcacattgtgcacatgtaccctaaaacttaaagtataataataattaaaaaaaaaaagttcgagaggttttggtcctggccaactgcctgaagactgagacttttttttttttttttttttttttttttttgagatggagtcttgctctgtcgcccaggctggagtacagtggcgtgatctcggctcactgcaagctccgcttcctgggttcatgccattctcctgcctcagcctcccgagtagctgggactacaggtgcccaccacc[147 bp omitted]agactgaggctttttaccgggatgaggaaaagtacttttgatgggaaatcaacaagctttgaaattcttaactttgagatgcacgttggtcatcaaataagtggttggagttaggggaaaaagccggggtttgtagataaagactttctgactttgcgtcacagaatttagtttaattaattaatttattttgagacaaagtcttgcactgtcacccaggctggaatgcaatggcacgatcttggctccctgcaacctccacctcccgagctcaagcaatcctcctgcctcagcctcccaagtagctgggaccacatatgctctagcacacccggctaattttttagagatgagggttcactatgctgcctaggctggtctcgaacccctgggttcaagcaatccaccccatcagcctcccaaaggctgggattacagtcactacagagttttaaaaatacacacaaagatgttatggtatgaagagactcccacgtacccatcgcccaatattgacagacatctgcatttttcttgtcttatgtcttctatttttccctcccacatataagcatacttcccgccaccccctggagttttgtttgttttaagaaaatcacagataacctgtcattttgttaataactatacaagtatgctaaattttggagctgcctatttatagatgatatttaaagctatgatttgctgagatcatctaggctgagaggttgaagagagcagggactaggcctgagcatcccgcatgtagaagccaggatcctggagaggggctgagatggagccaggagtgtcaggagaggggatgacctggcgccatgggatcaaagggttccaaagagaagataatggactaaggagcagagacacggggcagcagctggaggcagatgtggggtccaccatggaaaagacatgacttttgatcccccatctaactgtgttatggaaccttctcagtatctatcaggaaaaatgtataagtacttatttttctttatttttatttattttctttttgggtgacatataacttaagtgtggtaaagtatataaagggcacagatcttaagtgtaccaggtaatgaattttcacaaatttatgcatccatgtaaccgctaatcagagaacatttccagcacccagacgtcttccttgtgctctttccctgtcaattcccctgctccagaagcaaccacccatctaatgcctttcaaaaacaggcacagagattcgttgtgtctgtttttgaacttcatgcgaatgaaatcttacagcatgtcttccgtgtgtctggcatctttagctctttatgtctggcaaagtcttttatgtcattctatgtagcaggagtttagaaccaactttatggccgggcttggtggctcacatctgtaatcccagcactttgggaggcggaggcagaggcaggcagaacacgtgaggctaggagttcgagaccagcctggccaacataatgaaaccccatctctactaaaaatacaaaaaattagctgggcgtggtggaggtgcatacctgtaatcccagctacactcgggaggccgaggcacgagaattgcttgaagctgagaggcagaggttgcagtgagccgagatcacgccactgcactccagcctaggtgacagagcgacagatattttgcagtttggtgaatagtgaactttaaggaaaatggagaatctaaaatgcttctgaaagttccagtgggatgtttataagatgggagaaattatagcatgtttgtgtgcagatgggaatgatagagggaaaagagaccaggagactttggagctgttttttgaggaggtgtggacagggtgagggggctagacttgacttgaagaagggccagctcatcctggaaaaagaaaggaaagttttatcatttgacaccccctccaaattataaaaagcactctcctggtttgtatatgttagcagctattccacacaacataaaagcttaaagcatgcctttggactgccagtctggtgttgatgatgatgatacagcttcctttatggaccataataaatagctgggctgggcatggtggctcctgcctgtaatcccagcactttgggaggccaaggtgggaggatctcttgagcccaggagtttgagaccagcctgggcaacatagtgagacccccgtctctacaacaaagaactgaataaatgttagtgatgtttatttttattctgagtggatggggcaagaaggaggggagagcagcaggcagtttgggaaggaagaggagcctagtggcctgagcagccaggacagggaggagaaggggaggccagaagacggggagagactgagcttgcagagtcccccgggtgaggcttgtgggcatactgacacaatggaatactactgtgtaatgaaaaggatgagcagcatggctgaatctcaccaccaccctgcagagcccaagacacagatacacaccagggcgtgcagcagggttccttccaaagttcaaagttgaacaaaaggaatcaagacaggtcaggatggtggttcctgggatgaagggggctgttggctgggagggaaatgagagctttagggggctagacacttctagcttgatctgagtgatggctactcaggtgaatgtatttgaagaaatatattgagattacatttaaaatttgtgtactttattgtatgttaaaatatatgtcagttaaagaaaaaaagggggcaggcatggtggcacacagctgtagtcccagctgcttgggaggctgaggcaggaggatcacttgagtgcaggaattcgaggctgcagtgagctacgattgtaccactgtactccagcctgggtgacagagcaagactctgtctctaaaaaaaaaagagctggactcagagctagactttgacaggagggcagtgggaggaatgggaagtgtgtgggtgttagaaaggtcctcaagggcagttgggggatttatgaaggggaaaggcccgtgactggctgtatgaccctgggaagcccctgccctctctggaccgcctttcccccacccagtcctcatgagagtgcaggcagaacagaaataggagaaggaaggagccaaaatcaccatgagactcagctcctggaggacagagccctctgattcatgtctgcagcccagctcctggctcagggccttcaggaagtgttgatttggtgaggggggtgcaaaacctgccagaagtgggggcatccaggcttgagccccacagtggagaatgagggcaggcgggccagggcagatccaagataattcagaacacaggatctcttgtatgttctcctaggttcttagtcaaaagccccttttcactggttctgaccttgcctcagctgaaatcaacatgggatggctcagctgaaaccaacatggggtggcttcaggccatcccaggcattcagagggttcgtttaatgacattcactgaggccctgtctatgtcaggcccttggtgttgaagacgcaatcatgaacaaaaatgaaaatacaatgtgatggtctcctgagtgtctgaatgcgccaggtggctaagtgctggggctctggggtcaggctgcctgggtcacatcctggctccaaactgctttgctatggcttcgggcagttacctcatctgtaaaatgggaccaacattgcctaccttgcctccttttgtgaggtcacttattaaaagggcttagcgtggtgcttgacccattattattattattattattattattattattattattattattattattactactactactactacttgagacagggtctcactttgtcacccaggctggagtgcagtggcacgaccacagctcactgcagcctcgacttcccagcctcttcaagtgttcctcccaccttaccctcccaagtagctgggaccacaggtgtgtgcccccacacctggctaatttgttgtcgttgtcgttgttgttgttgtttgagatggagtcttgctctgtcacccaggctggagtgcagtggcacgatctcggctcacggcaaactccgcctcctgggttcaagtgatctcctgcctcagactcccgagtagctgggattacaggcacacaccaccacgcctggctaatttttgtattttcagtatagacagggtttcaccattttggccaggctggtctcgaactcctggcctcaggtgatctgcctgcctcggcctcccaaagtgctggaattacaggcgtgagccaccatgcctggccagacccaatattattatcgtgatagggataggtttatgaggctataggagtatcagacagggcctcctggaggaggggacatattagccgaggcctacaggaggcgtaggaaggagtgtttgccagctaaaagggagtggaggcaaggaaagagaggtcccagaagaatgagtttggcaggggctttggcaacactgccaggagagcttcttgcaggggaagggtgtcagcaatatctggaggtctcatccagttcctttcttgagtccccgcctttactccccaggtgggctggcctccagaggaagggcagttcgtggcagtgggtggcggaggctccaatttagctctcagggatgaaggggcgaggctggctgtggactttaagggaaatccaaagatagctcaacagaaaaggatgactcgcagcctgatcttcccctcaagaggagggaagcaagaatgaatcagcctctcaagctggaatgaagttgcggcgggaagtcagtcctcggtttgtggcccaaggccactctgcctctgactcaccttgcagtggggcgggatgggtgtgaatctgggctctccagcccgtattcctagcttccggctgggggcctgaggggaggcctggctcctcttgaaacctcggtttctacatctgtgcagtggggtaacgagggtcaggagagtggttatggtgacttataaacagagctgggcacacagtagggcctctggaagtgccagcccccctcctttgcccccttccctttcacatcctctcttgagcggatgtgaaacgggtatgtgggtggtttggggaggtttggggcctctgttagtctcttgatgagtgagttgtcatctagattctggtaaggcatgaatagagggagaaaagcaacaaaaaatcagaaaaagggcagccacgcattgtgtgtgaaaatcaaaaacaataataaaaatgattcttggccagggacagtggctcacgcttgtaatcccagcactttgggaggctgaggcgggcagattgcttgagcccaggagttcaagaccagcatctgcaacatagtgaaaccccatctctactaaaaatacaaaaattagccaggcgtggtggcaggtgcctgtaatcccagctacttggggactaaggcaggagaatcgcttgaactctggaggcggaggttgcagtgagccgaaatcgcgccactgtactccagcctgggtgacagagcaagactccatctcaaaaaaaaaaaaaaaagattctctctcacatatttggttcctactaaatgcctctgggctactccatgttttaatcttcacagcagttccatggggaggcagtcccatttcacaggtgaggtaaactgttcagaggtgaagccacttacccaagatcacaccaccagtggatggtagaaccaggatttggaccctgatctgtctgagttcaaagctgttgctctttgcctcagatctgggcaggggactgttgctgaggactgcccagcctacagagttgggagggcacttacaggagaaggcctctgagacaggttcagacaaggcaacagtcttccactggacggtctgccagttaggagtgtagatatgtttagagagaaatggcaacttctggctttaacatttattacaaagataagagcagaggctggtgagttacacttcttcctccccaccaggtgctctctgcagctctggaaaaatggtgtcctctttgttgtcccaccagggggcgccacctccagccccgccccagcctcatacccagttcttcagctcggccagcggtaactgaagcctcccagaatcctggatccgggcccctagtaccctctttcccagggacccaggagtcctgcctccagtcgcctgcacttgtaactgagagctggaggtcgtccatagcagcatagtgagagtgtttttgatgagggtatgcagagtgggggtgaccatgttcccacctggggcctcaggtgggccaaggcctacccactttagccagcgtcccctccagcagccatcagcaagccaacccactccaagccagggccccctttggtccttgcacttgaggtgctttgttcagggctgggtcaggagtggcagagacgatgtccaccacctcagtactggggaaagtagcctggttcctcctcgtgggtcctggagagacagagagactgatggagaggcaggccaggaagagggagagtgagagtgggacacaccgaggtgcagacagaaaccggtgggcagaagtgggagacagggggcaggtgtttccgggccccgaggccagggggcaggagggcatttagacagagacattggatggacagccagacaatgtgcccaggacaggcagagagagagagagagaccaagcaaagagggagaaggccatcaagggtcagtgaaggggagagggtacaccatcttccttcactgccagtccagccccgaactgagtcctttcctccagacagtgccagagctgatgagaaaaggcggccttgtctcccagccatcccccgcccccttagccacatagggtgctggccacaggaacccttcctccaggatgccttcctgcccaagtcccagccccctcaccagctacttggactgctggctgggttctggaagctgcctcggccccagggcagtgctaagcagctcagtcagggcatccagcttccccgccagcgtgtcaatctgtttctccagggcccggtgtgagctgctcagattctgctgcaggtcatacaggatcatgtgcatctgggtgggaggagaggatcagaggtgtcggggctggggtcgacccccacctactccatagcgtaaggcaatggaaccaatattgaccacatccttatggtcctctgaggattaccctcgacaataactgttaccatgtattgaccacctaccacttcccagctacctgcccaggtgtttccctatatggtttaaaatcctcccaaaagccacagggagtgggaatcctgttcctgtcttacagctgaggaaacaggcatggaacagttaaatgacatgcccaaagcagctcctgaaataagacctagaacatagcaggtgctcattagatatttctagcatggatgatgcctgacttccaaatccacatagtcttttactgcattctctggctaggattcactagttgatccctgagggtttgtggattttctatggaaattcttgaattctgtgtttttggcttgataaccttcagaaattaccacctgccaattcctgcagatctgggccactgcctcgtcactgagacctgccatgcggttttggggcctgcatctgtgaccgtgcttaccatggcattgctgccaggggccactgtttgaactgtcgtgggctaacgagaaaaagcaaaggccaccagataagcagaagatgctgtgagccaggccaagggggtgttgtgacatcattgtccctaagcactggcgaaatcaaatggtctcagcagaagaagggggcgggtagctgagtcacgccttggccaggcaaacttgcatggacgtccctgttgccctgagtacccctccacaagagcagcagagattgagttttacggaaacaatgtcacctgtgtccttgtcagtgttgttcattttaattgtattggttttgccgtctatgggcttggtttgtaaatttgctttggttttattgtatgagctgtagttggaaggaattttatatccgtccacatgtaagtaacttaacaataaagataatttgaaaccaaacactggggttctttgtgcaattttttttttttcagtttgtaagggatctgtgcctttcatgaatgtaagaagctctgtgttgcatcattcattccttccttccttcattcaaccacagacctttactgacaggctgtgtgtgccaggcccctgccaaggttccctgttctagggccagatttccctccctgtggccccaacctcccccttcttcaagacctcctcccacgggatcctagtaccttggagatgtccaccatggagttcacttgttcccggagcttccggtgtttcagccgcacctggcggaacctgtgggaagaagtggggagtcagttttacaagcctggtccctgaatgtagctgtagctcaggggaggaatgaagggaggagaggcacatgaagaaacaaaacaaagaaacaaagttgtcgaagagctgaaagagtgggaggggatgcaccctgcctccccacgagcccccatccccagtagaaacccaggtacccaggtccgcagacacaccgagatatgcggagacaaaccagcacagacacatagagtcatgcacggtcagatccaggtgagacctggatgttgagtgagaccacacctgggtgtcctgacctggacaggcatggacatgcacacacacagccgtgcagagaggtgacttggacatgggtgcacatggacacgtgtgcatacaaagcggccctcacgcgttgatggcggccagcagcttgcgctgatgcctgcgggcagcatgagactccttcctgcgagtatgtttgtagaacatccaggcttcttgtagcactcgggcagcggactccttcatctgggggtgggtggcacagtgtccgtggagatagacccttacggttctgggaaggcagggctagggctgggactcttgggtcctaggggaagcaggggcgcctggactcctgcttcttggaagaggggtgtcccatgggtgccatatgcccatctcacctctttggtatactggatatccatcatgaagttgtgcacgtgcttctctgccttgttaaactccagcttccgggccaccacggccaccagcagggctgtgcagcagacaccctgtgggcacagcaggcaccgtggcatgaggctgtgccaccgactccctccttgaacccgcccaacagccacagacggtaggcacgaccatccccagttagcagacaagcaaagaggctcagagaggagagccaaggtcccagctcagagcggtggagctagaatcataaatcgcatacgtccgagcccaaatttgatgcatagcattcacaccctcagggtggcctcttgaatgaaggataggattggaggagtgagaggaaggctgggttctgagccaggggcaggcctctgggtcctcagtgctcatgtggtcagccattgcactgtggagggcgaccatccttctcccactcccacaacttcttcctagctccagccctgtcttctctctcctggaccgtctccagcctcccactcatcctcccctaacccccttggtcccctctaatctcccaggcttccactggcctgaacgtctcagcctggctcccaaggccttccaaggtctatgcctcccacctggacaactcagccctggctccatgctgcctgccctccctgagcaccttcctccgaacactcattctcctcccttccttctcccaatgctcctggcccttcaaggccttggcaattcctagctgcttgtggcatctgctcacctgtccccaagttagaaggaatcttcctaggaagcatccccaaccctatagtttcagctcttgatcactcagaacaacttccagtcacaaacgctggctccaggggactgcctgggttccaagcccagctctgagcaagttatttaatctctcagtatttcagtgtctcatctgtgaaatggcctcacagggttactaggtggatttcatgaattacccctggcaagtgtgtagggcagagactggcacagagtatgtgctccggaaaagtaagcttttatggcccaaccatgccatggagcctttcttccaggagcaggctgtgagctcaagtgcacatcaccctatctctctaggtttctgtttctccttttgtcaaatgagggaggaggtcctgagcggtgctgcaggtccctaactgagtctctgcccctcttcccttgctccaaagactcaccactgggggagtggaggtcaccacatccttcacctgtgcacctagggattgggggatgaatatgtccttcctaggcccacatctgggctaggtgctggtggcttaggtccccgagggtgaggggaacccgatcttgtagggaggtgaaggccaaggcattaggtgctagtctctagagggggccagggctgggtgggaggacctgagtgactgggtctatggagggaaggaggtggatgtcagggttcaggaagaggctgactcaggctgcagagcctctgcctcatccttgagggcaacaggagctggtgtggggtggctggatgcctggccacccctagacctgtttactgagcacctcctgtgggctgggcactgttggaagcactttacgtagttggacccatttaatcatctcagcaagcccatgaggagcatcagcatccccattttatagatgaggaaagtgaggccccgagagatcacgtggctcgcctgagctccccagccaggaagtggcagccgcaggattcggacccaggtagcctggccccacaggtatgcacttgataactggactctacacccttgatggaggctgggagacgatttcccagttctggaagaaaatggggctgcgaagtcaggagcctgggtccctgaggaggataagggctggggccctaggttctagagagagcaaggacttaggggctggattcctaggtctgattttttattttattttttaagagacagggtctcactctgccacccaggctggagtgcagcagtatgatcatagctcactgtaccctcaaactcttgggctcaagtgatcctcccaccttggcctcccaaaatattgggattacaggtgagtatcttgttcttgaagagagaatggggctctgggggccccagacactcaagtttctcaggagctgtccctgagagcctgtgttgaacccatttaatcatggcttcctggggccagaggatgaccagtttgggatagggatcatgtccccaaggcagctgtactcaccatgactccagtgcacaggcagacgatcttgccccacatggtgcccggcaccacgtcaccatagccgatggtcaggaatgtgatggggatcagccaaagtgtgtctgaaaggtgcccagtggcattaacagcctgcctatggggaagggtaggttagttctaaaaccccaccatagaggtttccatgatattcactccccttccctctataccctcccatccccttccctctggttccctcccttcccctcccagtatacacccatagtcctaagaatcacctggacaaaaagccattaagttctgagctttggaaagcctgcatggcctcctctctgctgtgtgacctgggcaagttgcttagccactctgggatttgagactgggtctggccaatcccaatgccggtatggtctcagctaggctacccgggctgctgtagcattcagagcgtgtggttgagggtggagagtcgatagggggccaaaacccagtcagaccctgactggtggctacatccacccagaggaaggggtatatttttctaatttccacaaagatgctgtgtggtccagaagtggccctatcaggaccaaaaaggactctaaaaaggcttggtgggactcggccttcctttcctctcacttcacagaggagacatttaagtccagccatggaaggggttgaaacattgagatttgtctaactttgtccacaggccccttgccgcaagaccagcagggaaagcttcattcatgagggcccctgacaccccagacccaccgggttggagtttctaggagcgaagatggaatctgtactgttcacaaaccccaccccctcattccgaagtacattctagtttcaggacttctgccttggaatgtggaactttgacttcctccccattctcccatcattcaattgagaaacatggtggggggatcattcattaatcctgattctgaccaatttcccaattgtgaaaactaagatcctggaaggtgaaggagtttaaactcatgacagagggcgggcatggtaatcccagcactttgggaggcttaggcaggaggatcacttgaaatcaagagttcaaaaccagcctgggcaacacggtaacgtggtctctactaaaaatacaaaaactagtcaggcatggtggtgcacatccgtaatcccagccactagggaggctgaggcatgagaattgcttgaagccgggaggcagaggttgcagggagcagagattgtgccactgcacgctagcctggataattgagactccagatcaaaaaacaagaactgccagggagactacagatggtggaacgtgacatgcatttttcagatgaggaaactgaggctcagagaggagagatctaaagccagatcttctcattctcctcctgccctgaaggatctttgccacatacactagaccagaggttctcaaccttggttgggccatagaatcacctggaaggcttgctaaagtggattgctggccctaccctccaggattcagtaggtctggaagggacctgagagttttcatttgcaagttcccaggtgatgctgctggtcttgaaatcacactttgaggaccactggctgagatcactcccaacctcgtttttctctgaaagggatagaaattgaggcgcggcatcgggttacacagtatctagctggcaaccaggatctagttccaattccctgcttggaattattttccagagcagttccaaatcatccccttcctaggatcacaaaaagcacctacctacagtgcattccgtgctaattgggaaaatatgtctccttcctccaaggcagaggcaaccctttaggcaggtcccagagataggttcggagaccgaacagatggcctgtaaacctgaggcagaggtcaggcagccggaagggaggggctttctagggtctgtgtgtgcgtttggggagactgaaggctgcaggtggaggattggctgggggcttgtctgttggttcctctcaccccagttgatgggagtgtgggcaaatttcagccagcaagaggagaaggggtcaaagtgtgaactttctccactgcttggtcctagggggcctcaacctgcaccgcggcacaggacggccgccgtggctgtccggggttcccccctgcgcatttatgcctccatcaccctcacctctcggccacggacagcacccaggcggtggtcagccagaggccaagcgtgaggccgagcagcaggcggccagggtgcgtgttcatgtaaagcttggccacgaaccagtggcggaagcggacttgattgagagcgccgatgctgcggtaggaagcgttgagcaggacgccgctgcgcaggagcacggcgcggggcaccaggtagagacgcagcagcatggccagggacagcagcgcttccccttggcccaggaatcccggccagggctgcggggaggtcagcggcgcccctaaatcctgcacgcacggcgggccccgcacgggcgccgggtgcagcccacacaccaccagctccagcacgatctgcgccgcctgccgcccggtcagcgccacgcgccagtcccgcagcccgttgtcggtcatgaacagctgccggtagggggccaagaagggaggggtcaggagcaggtcaggcgcaggtcaggcggcggcccgcgcctgcctgcgccctgagataagtggggtgtgccgcctggccaggagggagggagtgcagggcgggagagggatagggagggagcgggacaggacttgaggaagacatctttccactttttcctccttccccaccacccaccccactagtttcagcccacttccagcctttgaacactgactgagcgccgactgtgtgcctgacattgttctatgtgctaaggatacacagtgaacccaacagacccccctgcctccctagagcttgcattccacatgcctggagctcgctcctactcccctttcggttgacacgcgtaataactgtaataataatatcagcaataacaaagccatgggccgggcgcgatggcttacgcctgtaatcccagcactttgggaggctgcggtgggtggatcacttgaggtcaagagtttgagacaagcctggccaacatggtgaaactccatctctactgaaaaatacaaaaataagccgggcatggtggcgcacacctatagtcccagcttctggggagtctgaggtaggagaatcacttgaacccaggaggcagaggttgcagtgagctgaggtcatgccactgcactctagcctgggtgacagagcgagactccatctcaaaataaacaaaacaataacaataacaaaatcagcatgtactgggcaccgtggatacgccaggtactgctctatcccgtttacatattgtgacttagtaaatgcccacaacccagtgagattgatattattattgcccccattttatagatgtggaagctgaggcccaggtcccttccatgggcaatggcgcactgggctacaggctacttagctactctatgataagatgataatgtgcactgtttactgagcacctcttatgtgccaggcactgctcatagaattgccacacatggccaataatccccattttacatgcaaagttatgataggagagggggaagaggggaaagggaatggagcaacaggatctggggcaatgggacaataggggatgggatgtgtctgggtgagacccaaggtggggtatggatggggagagctcctgggtctggggcaagagggaggttattggcacagagatagggtgattaggagtgggcacccctgggaccggaccaggtgcagtggctcaagcccgtaatcctagcactttgggaggacaaggtgggcagactgcttgagctcagtagttggagaccagcctggacaacatagtgaaaccccgtttctactaaaatacaaaaaaattagctgggcgtggtggcatctgcctgtagtcacagctacttgggaggctgaggcatgagaattgtttgaacccaggaggtggaggttgcagt[131 bp omitted]ggatgccatgtcggagcacagagatctgggaagctgagtgcctgggagcagagtggacagaggcctgggggcggaagcagggctgcaagggcactctcagcatccgtgagtgtgcaagggggggctggggactacaggggaaggcggagctggtgggggaggctctgcctgtctgctcatggttcatcccatctgggtaggtgagggtgtggacgcagcacctagggcagaagaacttcattactcagatcaggaggaggaggagggtggaaagtgtgagctgacagggcgctgagggggttggagggagcaaggcttaggggcggggcctgccctacctggacctctttggcatgaaaggccacgatgaggcagaggagtaagaaggtggaaatgctgatcgtgcatttaaccaggaacaggtagagcgcccactgtcaggggggacggaaaaagcggtgtgagatcccaggtctccctccgcctggccctccacctttccttcaaaaccaccattttttttttttgattcccaattttcctagcctccttcccctgcaaatcagtccctcttgatgtgtcggttctggagaagtctcaaaaccatcatctgggcccagtgcggtggctcacacctgtaatcccaacactctgggaggctgaggcaggtggatcaccgaaggtcgggagtttgagaccccctggccaacatggtgaaacccagtctctactaaaaaaacaaaaaattagctgggtgtgtaatcccagctacttgggaggctgaggaaccagaatcttgaacccaggaggtggaagttgcagtgagctgagagatcgcgccactgcactccagcctgggcaacagagcgagtctccgtctcgaaacaagcaagcaagcaaacaaacaaacaaaaaaacaccatcatctggtccccaggaatgctctctttctccccaacaggacaaccctgtccagatgctggtgtctaccctcttcctcagctcttctcccaagacccatacccatgaagggggaccttgaaactcacattccttcttattcctgtcccatttcacatcaaaaatagttcttcaggtgtgtgtgtgtgtgtgtgtgtgtgtgggtgtgtgtgtgtggtgtctagaaaaagacatctagcctctagagagtgccccctccccttcccttcctacccacctggtgttgtcctagaaaccaacttcaatcaaccccaaccccagatctggaagaatgtagaaactaccattcaatcctcaaagactgagtcacacccttctctgctctcatccggagggctgagtccctgagacccagcctcagctctgagacagccccctcggttctgcccccctgcagctccccactgccacccctctcttctggctctaagcccagggcagatctggccggaagcacagggcctccagaaaccacggagaaattgttcctttttttttttttcctctctttgtgtggcacaaccttggaggaatctagaattctggagagagggatttagaggggactgggactgttggatttcctaagaggggttggtccctgcctggcgggtatttgcagggggaggggaccacctgggcgtccttacaaagcattgcacctgtttctcctaagagggctgccagctcccctggctgggccagcatcccgcctctgagcaggggaagagggccagtttcctgccccaggggcctgctccccaaccccctatcagaacaatagtgctgttgtcaccagccctcccccaccttctatggctccctggttccctgcctctttcttcagtctgtcttaactgcccacaccactagacaacaagctccctcctcacactgcaatttgcttctctggtggtcctctctacttttccatttcctcttcccccaaatcccggacctgtctgcacttgggcctgtactctgttctctgaatttccctgtctctagggatggttgttgctgtctttctatgtgttttgagggtctttgtttctattgtctctttttttttttgagacggagtcttgctctgtcacccaggctggagtgcagtggcacgatcttggctcattgcaagctccgcctcctgggttcacaccattctcctgcctcagcctcctgagtagctgggactacaggcacacgccgccatgcctggctaattttttgtgtttttagtagagatggggttt[144 bp omitted]tggatttctcagtagcttgatagccctatttgtctttctctttagctgtacttctctatctttctgcatttttgtctccatctctctttttctctccatgtatctctgtgtctctgtctctctctgtacctctccccatccctcctcctccaccccacctggtgcttttggatatctctatccagttcccttggactccctagggttttgcacctgcctctctgccagcccctccccctggggagcaggtgtctgggtcctttgcagaaatgagctcattagattgagatggaggtggtgaggggcggtggatgttattaagagagtcctcaaaaggggactgaggagctgtggctcaggcctgtaatcccagcactttgaggcaggaggattgcctgagtccaggagttcaagaccagcctaggcaacaaagcaaggtcccatctctacataaaataaaaagggtggagggtgacccttagggtcatgtattttaaccctcaccccaatttacagatggggaaactgaggttcagagggttgtaacagcttccccaaggtcccactgatagaggcagtggcctggccatggtggagggaaggaagaaatgaggggtgagaaagcagaggggtgaagtggggtaggatggaccccgtctcttcccatctgccagggtcactgtgttcccacctcggcttctgggtgcggtgcttcggcgtgggagcggcgggcaggccccggccatgcttcctgttggcatggacttcggcggccccaccccctcagtgcccgccgcctgccagaggaagctgcatgcctgaccctccatgtggctcctggtcacttcagagctgcccaccaccccctccagatccaagtcggaacatcagaccctcaggaatctacccaatcttcatatcagtgtccgcatctggccctaccagcccagttccacaacccttctgccagagaggtctccagcccctcctttcctgttgagcaagtctgttctcccctcaagccacttattccaacccttgtccttgatctgccccatcactggcctgaccagggctggaatgtgacgggagcctgctgagacctgccctgaccccactttcccctttcttccctactcaccactcatcttcggagtcagcccctcttccccaaaagcaatcaaaacccccttctccttaagactcaggaatccaggacccagccccctcctctcctggtacctaggagtccaggccactgtaagcctacctctccactatttccctgactaatcagcatgcagatttggggagaaattgagcttgttaacagtggagactgggttggggttggtggggggaggcaggtcgggggagaggtttgtttcccatttcccatccccacccccaaggcagttttttctgtcctttgcatctaaggcactgggtaaacattagaggttagacaaggaccaaagagctgccgcctactggaagaactttgtctttcctccactctcccttcaccaaacctggggctacctctccccttattggctcttggggggcttgagtgtctgatcagccaccctctggcctccaggggtcctggacctctggccgtctaatggcaacatcttcaaagactgaaacactgaaacaaatattcccttccttttgcagagaaggaccccagcaactgtctcctgggagcacccaggagtcccagccaaagcccctcctccctcagacccaagagtctaggcccccaacctctcctccctcagatccaggagtcctgacccccagcccctcctccctcagacccaggagtccagaccccagcccctcctccctcagacccaggagtcctgacccccagcccctcctccctcagacccaggagtccaggccctcagtccctcctccctcagacccaggagtccaagtccccagtccctcctccctcagacccaggagtcctgaccctcagcccctcctccctcagacccaggagtcctgacccccagccccccctccctcagacccaagagtcctgacccccagcccctcctccctcagacctaggagtcccagctcccagccaccatgccccactcaccgagcaccccccgaaccacagcatctctgcatgcagcaccatgagtccaatgccagttcctgccagcaccagtgcccagccggccagagacttctcctgctccagcaagcgctttcggcgtctcaaggcccccaggccaagcaccagatccccgcccatggcccccggggtcttggggctcagccagcttcctgcccagggtcccccacctcgcagcacgcacagggcagccactgtggcttgcaggtcgtcagcctgctctgctggctctgggacttttgctctgaggcacagcagagccctgtgccctctggggagtggtgacggccaggcagggcggggaggggcaggggaggccccagggtagggggaggctccccagctcccccttttgagaataaggaggggctagggtgtgtcttggggcagagcaagaaagagacgtccatccacgtggataaagacacacacagacacacgatgggctttgtcacacacaatggtctgtactttgtgacacacacctctactcaccacacccagacaccgaaggacactccacagcccaagacggagactaacacaccagggcacacaacacaacctacacagagtgactcacaactcccagcaagctctgaaacccacagccacacccagacaccacacacatggtgtgacacacaccagcacttagcaagcaggcagtatcccgtggcacacacagccacccaaacaccgtccacacacaggcacaaatattacactcaaagttgtcacaactttctctgacacaaagagccacacccaaacaccacaaataggacgatgcacaactgtggccacacaaacacaacatacaccaggtgttacacaaacacacaatatatattaaagtagtgacgccctgatgccacacaccacacaccgacacaaacactgtgcagtcccagtttcctaaacactacacacccttggaacgaaacccaatacgtgtagacacacaacatttagggacatacctatagtagcccccaatcacccagagctagagaattgcacatacattgtggcgcctgttgactcgaacacaagtgctcgcagtgatgattcaaaacacgcactgattcagcatgctctgatgtgtggtgcgattcaaatgtatggtcagaggacaagctgagtggatgcatgcagagacctacaaggtacagcgacacacggagaaacccaagaagcacatgcctgaagcaagatgattctggtatattctggccacacaggacaacatccaggatgatgccctgggggaaggggatggggttggaccttcatagaccccagtgcccaaatgcaacatacggctgggtgcagtggctcatgcctgtaatcccagcagtttgggaggttgaggtgggaggattgctggagcccaggggtttgagaccagcctgggcaacatagcaagatcctatctctaaaacaagcaaaaacaaaaaaacaaacgcaacatacaccatcacctctgagccatgagccacacccaaacatgacatacaatacctccacacaacccaacacgttatattccaacatgcgtggccacacaacaacatacgcggagtaatacaccagcacacagtaacgcaaaacacataaacacaatgttttccaacacacccaaccttccacaaacgaccacatgtcccataaaacaccagatgtcaccactcactgatactactgacactgaggtctaccgccacccacacaacaccagcatcgggggaggggggtgtatcctctgacacaacataacacacagctacacaaacacaagacacttggggtggttggcactcagggtgggtgctgggggctgagaaggaagaggcccccaacagggacatggaccctgacgtgagatacagcaaatgccagtgtggaatgtgcacggtgactctcagagcaacacacaacataggacatctccatgtgtcgcagcacgagccactcatggatctgtacaccatacgctccgacacagatcaaaccctcctgtggagacacacaggcatgcactgacctggtgacgcacatcacctcccagcatcatgcactgaactggtgacactgcccttggcctcatgcacacccctctgcaaggaacctgcggacacaaccctccccctccttgtgtcctaggtcgtgtgggaccctggacccaccagccccagggaagcgagacacgcacagacatgtctgactgcacaccaaggcagcccacacaaacacacccagagacaccaaaccatacacatggacacgcccagtggcaaaaacacaacccttgcgggggctccgcccctcggcacacacaattacccactcggcgagacttggcgggagagggctggagacacacccgggcgcgcccagacaccacacatgcgtccacttggggaaagtgcagccgccgggcactcctgagcctgcagcctgggcacccctgcccactggccgcccggctcgctgcgtctctctcctccctctccggctctttctctggttctttgggacttgcttcctgtctcagtctctcctgatctggaaacctccgcgtttgtcttttttttttttttttttttttttgagatagagtcttgctctgtctcccatggctggagtgcagtggcacgatctcggctcactgcaacctccacctcccaggttcaagcaattctcctacctcaacctcccgagtagctgatattacaggtgtgcaccaccacacccagctaattttcgtatttttagtagagacgaggtttcaccatgttggccaggctggtcgtgaacttctgacctcaggtgatccacccgcctcggcctcccaaagttctgggattacaggcgtaagccaccgtgcctggccaggtttgtctttatctctgtctctgttcttctctcctggtacctttgtctctctctgtctctcttcactctgtctctctgtctctgcctctcttagcctctctgtgtctctctcatcgctctgtccctttctccatcttcgtgtccctctctgctcctctgtttccttctttccccgtcactgtctctctgtcatgtctctctctgtgttcatcattgcctgtgtctctgtcatcgtgtctcactctgtctccatctctccgtctctagggccctctgtttttgtctgtctcttgctgaatcggtgtttctctccgtctctgtttcactctctccctgcctcctggtctcctcttgggtctctctctctctctccgggcctctctatgcttgtctctgcctcagtttctctctgctgttcactggcacatctacggacagcctggttccttccggttctaccccagtcccactcaggggttgagggccagtgatccagagactgtggccacccaagggtcagaagccactaaatagcgctccagctgcggccatgccatggcatctgtgccccagttcaggcacttgtgaaaaacggagacagagactgacacagagggagagagagataatcagagagacctcgaggcattcagccagggatggtgggggcatgtattaaaaaaaatcaaagagacccacaggtgcagagaaaccggaaaacacaatcaagacacggaagttagagcacagagaaattttgtctccaaataggccatgactgaaagagaaaaacagcaaaggatgggcatggacatgcctgggtggcagtgatggggttacagtgggaagggcacctgccttcaaactgcagtcctgggatgcaggggtcagtcctaggaaactgcttcactcctcagccagctgcctccagcccagggaggggccaaggggggagggcgaggtgactcagggcctcagggcttcttgtgactcacccttggtctcaatcctagaatggggagtggagggagagaggggtttgtgtaaaagagagggagagggaatagtagaggacctcaaaatgcctaagaggaagggtccaggaggaagaagctgggggtctggactcctggttctgagggaggagggggtctgagggaggaggggctggggtctggactcctgggtctgaggaaggaggggatggggtctggactgctggtctgagagaggaggggcagggggtctggactcctggttctgagggaggaggggggctggggtctagactgctggtctgagagaggaggggctggatctggactcctaggtctgagggaggaggggctgaggcctggactcctgggtctgaaggaggaggatctggggtctggactcctgagtctgagggaggagggctggggcctggactgctggtctgagggaggaggtgctggggtctggacccctgggtctgagggaggaggggctgggtctcatacactggaagaactgattccagagtctccaggatttttccttggccttgtcccagctgcaccacctctgtcgcagccccatctccgggcctggaaagaacccaggtgcctcggggcccagcaggaaggggccagggacaaagagttgtttaactgggcaggctggtgaaggagagtgaagagggtgtctcaggcggaaaggtcattcatcgcccaaggcttgtgcagggaaaggcagggctgagccccgaggaagagatcctgaaagtcagaggtcagtggcggcaaatcctccaccgccatctctgggaccttggagcctggaagctccagggcttataaatactgtcacctagtgttcacttaggcaactgcagacactctccctgtccagcctggtttcttgccaacatagagcaaaacacctactgagtgccaggcactgctcaaggagttggcgatatgtaatgaacaaaaatggacaaaattcttgctcttgtggagtttccaggctaaaggagggagacctcgtgattccatcaatctcagtctcttctttgctctcagtcttcatttttctctctgtatatcattgtccttgttttttctttctttctctttttctttctttcttctttctctctctctttcttttttcttttctttctttctttcttctctctctctctttttaattaaaaaacatttttttggtcataaaatcagttcccactatgttgccaggctggtcgcgaactcctggtctcaagccatcctcctgcctcgtcctcctaaggtgctggaattacaagtgtgagccactgcgccttgtcttgcttctctgtttctatctcctggtcttagtctccaagtgcatgcttttctcctttctccttttttcttcatttctgcttttattttcttctttgtatctctgtgttccccgccagttaaaaatgtatgtatattatgttattacacagagacatacacccacactctatatatagtatatgcagatatgtagtatagtatatggcatagtatacagatgtatagtgtatacagatgtatatgatatacagatatctatatctcacaatatggaagtctagagacctcggtttaagcctcgatgtgaccactgactttattcattcattcattcattcattcaagacagagtctcgctctgtcacccaggctggagtgcagtggcacgatcttggctcactgcaacctccacctcctggatgcaagcgattctcctgcctcagactcccaagtagctggtactacaggcatgcaccaccacaccaggctaattttggtatttttagtagagacggggtttcaccatgctagccaggctgatcttgaacttctgacctcagatgatccacctgcctcagcctcccaaagggctgagattagagggatgagacaccacccccggcctaactttatttttgtatggaatatgttatacgtacagcctggtttagagacaaacctgagttcaaacctagttgccatccatagttgtgtgctctgtgaaacttgtaaaagagggattatgtttcctatgtgacagggctgcttgaggcttaggtgagagagaatgtctggagccctaacagcaggcctggtctatgttaaagtcttgtgatacattgtctcccaagttgcctgccagtgactcctcccttccctgcactggcaggtggcttctcccacgaaaaggaacagtatgttccttctccttcagtctatctggctcatgacttgctttgactaatagaatgtggcaaatatgacactgaaccagttccaggtccagatgttaaggaaactagaagcttctgcttttgtacccttagaactagaagaccaccatgctgtaaggaagcccaagctagtcacatggagaggccatgcagggagaatgaagctatcttggctaaagccccagtcctgtcctaacagaatgcaaccatgtgaatgacttcaggagagaccagcagaaatgcccagtcaagcctcaatcatgagattgtttattttaagacactaacttttggagcgggttgttacacaataaaaagtagattattatacccttatgttcatatctgcatgtttgaagttttccataataaaaaatatatatatatgggccaggcatggtggctcacgcctgtaattccagcactttgggaggctgaggcaggcagatcacttaaggccaggagttcaagtccagcctggccagcatggcgaaacctcatctctactaaaaatacaaaaaaaattagccaggcgtggtggtgggcacctgtaatcccagctactcaggaggctgaggcatgagaatcacttgaacctgggaggcagaagttgcaatgagccaagatcgtgccattgcactccagcctgggtgacagagtgagacttcaactaaaaaaaaaaaagtatatgcatatgtatgtatatgtgaatagataataaaataataaaatgtataatgcaaattgcactccatacactgcagctagcatcattttgctcctaatttttttgcctatgagcctttcttggtcagtctcagcttgggtctcaattttcttgtctgtctttctctattgctttctttctgtgtgtctattcctatcttggcgaaactcctcccatcactttcctttgcatttactttgctttatcacattggccttgttgctgattctcaaacataccaagcttttttctgcctctgggtcttagcattttctgttccctcttcctgaatgcttgcacctccactctcttcatggggcattccctcacttcattcagttctctgctcaaatatatatatgaattattatatatattataatagtatacaatatataatatcatataacatataataaaaataatacatatatcaataatatataaatatataatcatataatatataaatatattatatattatatttatatattatatataatttatatataatatctaataaataattataatttatataatatatataaatttatattatcataaacatttgtttatatttatattattataaatatttatatttataatattataaatatttatatttataatattataaatatttatatttataatattataaatatttatatttataatattataaatatttctttatatttctattattataaatacttatttatatttctattattataaacatataattatattcatattatttacattataaaatatatatttatattataaatatatatcattatatttatatttatatttatgtttatgttatttatatttataaatttatataaatttatattatttatatattcatatatatttatatataatttttgtttcctattttattaaatttttttgagacaaggtcttgctctgtcacccaggctggagtagagtggcacaatcatagctcactgcagcctcaacctcccaggctcaagtgattatcctgcatcagcctcctaagtagctgggactacaggtacaagccaccatgcctagcaaattaaaaaaaaattgctagaaaaggagtcttcctatgtttcccaggctggtcttgaactcctggactgaaataatcctccttcctcagcctcctgaagtactgagattacaggcatgagccacagtatccagccactctgctcaaatataatctctgccttaaccacctcttcaaaaacggtctcttccatctccctcaatcatcctacatcttatttcactgctttatattttatcatagaacttatgactatataaaatgatctcattttatctgtctcattgtttaaggacaggaacctggccatcctgtgttcagaacagtgcctggcacatagcagatgctcaatgaatatttgttgaaggaatgctcttgttcaatgatactgataggcgttttttgactctagcctcttgtcctgttccacactgttcaagatggcatttcttcatttccctgtcttttgtcctccgttagttgagttgctgtctgtggttctgagacccaatactgtggatctgtccttggtgctgacctggacttccacttccgcttaagcttgggagggtgggggaatcttgggaaggggcaaggttgtatgtaaaatccagacattaaataatcattatctgcattaccagaagaagagagatgtctgggttcccaagtgggtgtatgggtcactgtgagttaaataggtattagttctatctattatctaccttttcatatatacatacatattcatatatgtgtacatatatatttattatcgagaacttcaaacatatagaagtgaacagaagagtataataaatctccatgtatctatttaacaaataccaattcgtggtcaattgcatttcatctgtgcttccatttacttcctcacttcctatgttatttcagtgtaaaacctagaggtaataccatttaatcatatgtggcatttaaaattgttttctttttctttttagaggcagggtctcactctgtcacccaggctgagtgcagcggcccaatcatagctcactgcagcctcgacctcctgcccccaagagatcctcctgcatcagccttccaggtagctgggactacaggcgcacaccactgcacctagttacttttaaaatttttagtaaagacagggtctctctatgt[136 bp omitted]gtatggattaattcagttaaacctgtatacagacatgtgtgaccaccatctctatcaagctatctccatcaccacaagaggctctcttgtaaccctcccaactgatacaccagagataaccagtattctgaatccctatcaccaaagattaaaaagctctaatatggatgtccaaagacctgagctctagccatgtctttgcttttgacattaaaaaaaaaataggtctggcgcggtggctcaagcctgtaatcctagcactttgggaggcc[136 bp omitted]ctgaggca[149 bp omitted]agtgcataaaacatagtggtacattttggacaaatgatgtattgtgaacctccataaaatcaaaggcacaccaagagaaagtatttgcattccctagaatctccttatgtgctcctttatgatcgggaacccccaacctccagaggaaaccactaccctcacttagaagggactttaactcctcgtagaccataacactcacactctggtttctcagttcctccttctgcctccagccttttaatcctaaattgcccttgactctggaaaccaggcagcatgagaggccctctcaccatccacctccctggtctccctgcctccaatctcactccctcgggcctgtctcctgcatggccacagggagagcctcatatcacctggctttgaccatgcctcgccccttctctatatcagtccatgtatccccattggctgtaggagaaagttcagaaaatgttatccctatttgacattgtaagcccttcaggggcactgccacatcttcattcacatcttcttcacttaaaaaaaaatagagacagtgtcttactctgttgcccaggctggagtgcaatggagcgatcatagctcactgcaacctcaaatacctgggctcaagcaatcctcccacctcagcctctctagtaggtgagaccacaggcatgcaccatcatgccccactaatatttttagttttttgtagagataaggtctcaccatgttgcccaggttggtttcaaagtcctgggctcaagtgttccttctaccttggcctcccaaagtgcggggattacaggagtgagccactgcttctggctttcctcacactttaaacacaggtaggtactgaaaaatagtttttcaaagtggttgttctattttacacacatactacttggatgtgagaatcccagtagctccacatccttgctaata[131 bp omitted]cctcagcctcccatgtagctgggactacaggcacctgccaccacgcctggctaattttttgtatttttagtagagacaga[145 bp omitted]ttgctacattgcccaggctagtctcgcactcctgggctaaagcaatccttctgcctctgcctccaaaattgctgggattacaggtgtgagccactgtttccagcaggtgaagcttttattaggtgagtgcaaaagtaattgcgatttttgcattgttggaatttgccatttgatattggaatacattcttaaataaatgtggttatgttacacatcttttttttttttttttgagacagagtctcactctgtcacccaggctggagagcagtggcacgatctaggctcactgcaacctccgcctcccaggttcaggcgattctcctgcctcagcctcctgagtagctgggattataggtgtgcaccaccatgcctggctaatttttgtatttttagtagggacagcgtttcaccatgctggccaggcttgtctcaaactcctggcctcaagtgatctgcccaccttgacctcccaaagtgctgggattacagttgtgagccaccatacctggcctgttatacatccttgtaatgggcatttcttgctttatgtttttctgctaatgacttattacttgatgtttattttatgtttattttagactctggaaatgatattagacaaaaagcacattagagcgactttcttatttcttatttgagttcaaaatgggtcataaagcagagtttgttgaatcctgaagcacatatttttatactacaggaatcaacaaacttatttctcattggcaaaaatgtgttgattgtaatggttcctattttgattaataaagatg[138 bp omitted]atggtgaaagctccccctccccctggcccctgtcactattaaaaatacaaaaattacccggatgtggtggcatgcatctgtacagtcccagctactcaggaggctgggacaggagagttgcttgaacccaggaggtggaggttgcagtgagccgagatcgtgccactccagcactctagcctgggcagcagagtgagactctgtctaaaaaataaataaataaaatgaaatttatggtccaaaaccataattacttttgaaaggcatctccctctctgctaagcactcaggaaggcatctgggtcgcaatacccaagcagctacatagccgagtccacagtttcacttggaccccccatactatgagttctaaggcagtcggtgcacccctgttctacttagtgagagctgtcaagtataagcttttagaagtttttgaatcattctcatgacaaagaactgccaattgctcatgtatttcatctcacaggagtccttggccaccatgcctcagggataatcttctatctcagaagtacagtcatacactgcctaacaaccccttggccaacgacggactgcct[135 bp omitted]catggtgaaaccccgtctctactaaaaacacacacaaaaaattagctagacgcggtggctcatgcctgtaatcccagctactcaggaagctgtggcaggaaaattgcttgaacctgggaggcggagtttgcagtgaaccgagatcgtgccaatgcactccagcctgggtgaaagagcaagactctgtataagaaagaagaagaagaagaagaaagattactatgaagctgagcgattccttttttccccattcctcaggctgaaacctatttaccctgttcctcaggctgaaacctaggagtcatctcaagtactcctcaaccaatatatcagcaggtcctgtcttctccactaataaaacctattccttgcagcctgttaaggagaagctaaatttttaaaaaatctattcattttccaactccttgcactacctctgccatcatctcttgcctaggtatatcatctctgcctagactggggcagtagccacctcacaggtctagcttccattcttgccacagggaagcttttaaaatgtaaagcatgtacacaagagcacatgctgtaggattccattcatatgaagtttaaaaataagcaaaattgatctgtgatagaagttggagtcatggttatccttggggtgggaaactgactctgaagggctatgagggaggctctggggacatgggctggaaatattctacatcttgacctaggtggaggttattcaggtatgtacatatggaaaaattgcaatttatgcattttattgtatatattttatacctcaatgaaaatgttatatcatatattacatgtaattatatgtgcatataattatatacacatacaacatatatatacacacatacacacacacacatacacccttatatatgattatggcagccttctacttctccaacgcattcttttttttgtttttttgagacagagtctctgtgtgttgcccaggcttcaatgcaatggcatgatctcagctcactgcaacttttgcctcctgggttcaagtgattctcctgcctcagcctcccaagtagctgggactacaggtgcatgcccggctaatttttgtattttcagtagagacgggatttcaccatgttggccaggctagtcttgaactcctgacctcaggtgatccgcccaacccagcctcacaaagtgctgggattacaggcatgagccaccacgctggctccaacacattctgtgttagtcttggattaaccacagaaacagaaccagtagacaatctataatataagatttattgcaaagaattggcttatgtggcctggctaggcaggtcagaaagagcaagctggaatctcaggcatgggctgaagcagctgtccataggtgcagtttttttcttcctcagagaagcctcatctctgctcctaaggcctttcagctgatagagtcaggcccacccaaactgtctagaacaatctcccttcctcaaagtcaactgattatggactttaatcacatctacgaaataccctcacatcaacacactgattagtgtttgactgaataactggaactgtcacataggtaagctgacacatcaaactggccatcccaacttcagaccacatttgcaataaaatccaaaatctggctgggcatggtgactcacacctgtaatctcagcacattgggagactgaggcaggaggactgcttgagcccaggagtttgagactagcctgggcagcatagtgggggccccatctctatgaaaaatacaaaaattagcagggtgtggtggcacacacctatagtcccagctactagggaggctgaggtgggaggattgcttgagcctgggagattgaggccacggtgagctgattgtgccactgcactccagcctgggatagagcgagaccttgtctctaataaatacacaagcaaaatccaaagttcgctttggattgctagcccatcaaaaaggctagctccttgaaggtgggaatttttgccactttagttccctgctgcatgcccagcaactggaacagtgccttgcacatagtaggtgctcagtaaatgtgaaggatgaatgaagacatccagcttccccttgtatgtcaggatgtaaagacacctgaagcccttgtcacatggccttacaggagcataggagcggagtgtttctgaattgccccccttcccacaagtctacttgctgacatggagcgagaagacacgggagtctactcttgctatgcacttactctgaaaattgctctctcactgtgctttgggcatcttgtctgtaaaacaggaaggtgtcttagtcccttcaggctgctgtaacaaaataccatagactgtatggcttatacacaacagaaatttatgtctcatagctctggagtctgggaagtctgcaatcaatgcaccagcagattcgatggctggtgagaacccactttcttgcttataggcacctgctggctgtgttctcatgtggtggaaggggcaaggcagctctccagggcctcttttataagggcactaatcctattcatgggggctccaccctcatgatctcaccacctcccaaaggccccacctcccagtaatatcactttggtaattaggtttcaaaagatgaattttggggagacacaaacattcagacaatagcaggatgcaacttacttttttgcttctctcactgagttgctggaaagatcaagtggcaaaaagcatgtgaaagaacatggtcaagcatgtgcacagagaacatgctaaaggatcccatctctatgaagttcatgcagttatgaaagtgtcctgcactcatgaaagtgtcctgcactccttgtgctccttcctccctcagacctttgtccaggctgtctcctctacctagaatgcgcttcctcctgcttctttttgccagctactattgatcctttaggattttgctcaagggtgaattcctccaggaagtcttccctgatctttatagcttggagaatttcacctcgctgaactttgccttgtgtgtttttctgtgaagttaatcggcactcatgtgtttaggaggtggggttgcttagcagttcgtggggctgggaatctggtccctgaatccatactcactagatacacaagctcaaccaagtgcttttgcctctcagtttgttgacctgtgacttagggcttatgacaagtagcccatttacactgggccactgctgtgtcccaagtactaaatgttcatctcgttgaatcctcactgcaactactgtgaagtagttcttgtcatgttatagagtttattttcacctccaccttataggtgagaaaatattggcacagagagctcaagtaactcacccacagtctctgcaggctgaatggtggagctgggatttgaacccatgcagcttagctccagagcctggcttaagtaactcacccatggtctctgtaggctgaatgctggagctgggatttgaacccatgcagcttagctccagagcctggcttaagtaactcgctcatggtctctgcaggctgaatggtggagctgggatttgaacccatgcagcttagctccagagcctggcctactaactgttagggcatactgcttattgggcttctcatgatgacactaataaagacatcattgtatagctccctcctagagctgcgacaggctctggagggagagcacaggaagccgtgttatggggtgcctggtgcctggctggtgctcagtgagtaacagctgtgatcagaattgctcttcatcggggcacgacatggctgttttgccctccccggggatgctggtgactgtgtccagtttcttccagtactgttggccaggttgtggggcacaagggcgggagagatggaaggccagagggacaggagtgcaattcttactttaacatcattttccagtgagctatgtgataggggctgaagcagcaagaatgaggtgtgtgagccctgtccccagcatcctggaggggcggtctatgctgagagccccaccagcaggaggactgggaggagcagggccaggacctgtagtgctcggggaggggtggtggctgaagcactggtgaagggctgggtcatggatttcctgttgcagaggtacccctcacagcaggagccctggaggtcgatggctgtccaggggctggtggtgccctcggtggtgcaggagggccggtggcaggttctgatgtacacagggactgagaaattgcctggaggtgggcaaagcagtgaggaacggtcagaactgagggagacagctgcacctgaaccttcaccttggtagctagggccatgcctcggtcctcagacttgcttcaggttttcctcctaagaccagggccaggcctccctcagaccagggccatgcctcttccctcagaacagggtcgtgcctcctccctcagaccagggccatgcctcttccctcagaccaggggccatgcctcctcccccagaccagggttatgcctcctccctcagaccagggcatggcctccttcctcagagcagggccaggcttctccctcagaccagggtcttgcctcctccctcagaccagggtcatgcctcctccctcagaccagggtcatgcctcctccctcagaccagggtcatgcctcctccctcagaccagggccaaatcttctccctcagaccagggccaaatcttctccctcagaccagggtcaaaccttctccctcagaccagggtcatgcctcccacctcagagcagggccatgtctccctgttgggcctgtctggtatcactaccctcatggctgccctgcctccatatcccttgcccaggcccttccacccttccagccccttaccaactgtcattctgccattgccctggaagcaggcggtctggtcctggtgacactggactcgtcgggacctgccgatagcgcagtcatcctggtggaccccgatacaggcgtagcactcggcgccgctgagcgtcggcgggtcgggtgctggcaagagagcgtagatgcacactcaggcagtggtaccctggcacagtcgtgcgggctgcgcactgcgccagagcccgcgcctagcacgtctcgggggttgggatcctagcgcgccaagagcaggcgcccagcggaggccacgccttccccgaggctgccaggcctctcatcgtccctcccggagcccagccccgctctcccgcgcaccttggctcaggttggggagggcgtcatgagtcatgaggtgggcgttgcatttgtcagttgtgcagccgcgcaccaccgagtagtctggcggcagcgcgtccgcgttcgattgcgtctggcccgcaggaggcccggtccagcagcccttccgcaccagggtcaccggcgcgcgataccctgggggcgggatcggggctcgtgctctgcttcccgaaacccttctccctccagtctcagcgttcttcctcctccctctatcctttcactttcacctacacctcctcccctccctccttccctccttcctctcacccccagaccttttcccccgagttcttctcttcctccactcttcctccctgtgcgcctctcccaccttctcttccttgcttccccattgtttcctcccctcaccgctcgtccctcatccactttttcttttgtggggcggaggacggagcctcgctctgtcgccaggctggagtgcagtgacccgatttcggctcactgcaacctccgcttcccggattcaagcgattctcgtgcctcagcctcccgagtagctgggattacaggtgcccgccaccacgcccagctaactttttgtatatttagtagagacggggttttgccatgttggccaggctggtctcaaacttctgacctcgtgattcgccagcctctgcctcccaaagtgctagagttacaggcctgagccactgccccagccctcatccacccttttctttttcttcctcctcttcttcctctccctccccatctttctatctttatcttttcatcttctactcaattcccctccctttctgctcccctctcccccctttttcctccctaatctctcatccctgtcccccggctcccgctccttaccggtgtccagagacaggatagcctcaaagcactcatgaggacaggagatgctgggcagcttcatggccctgaggtcaaaggggccaaagtaggtgtgctcaaagctgtagcactgcagggcttgggaccctggggagagaggcgtggcagagtcagcagggccagtgtgagcctgtcccaggaactcagagctccacccagcaaatgacaggcacacgggcctggcccctctgctcccagggaagacacgccttgagagaccaggtgctgctattgcagctggtcacagctgtgtctgtctcatggcagagtaatgacctctctgcagctgacagtccagttttttccctccaggacactccaggtctccaccctcttccaggaagccctctccctagctatgacttagaataggaaggaaaagtgattcattcttgctctgcccatccttccccaagcttaactcacaaagtggacagcacagtaagagacccctgacaagaaacatgcactccaggacaggtagagtgaagtgtggtcctgtagtgccctgtaaacccatacatcagccccagcaacacacaaactgacataaacacacaataacaacacatacacaggttcatccaagtctcacaaatatacacagaatatcctgaatgcacccaggcagagttttacattctcacacaaaacaagtacgcatctggaccctgcaatataaacctccctaactaaggcacagcacttcacacatggaaaatcacacagacacaaagcgtatgtctgtgaggatgcttgtgcctgtatgataaccatatcaacacagagagggaccagatgcacagaaaatcatacccagagaggtcccaaatcacagaagcacaaataaaaccagaggccacaattatgcgatgtttagagatacaggaaaatgagatcacaaaaacatacagtttaaaatcatatatggaggccaggggtggtggctcatgcctataatcccagcactttgggaggctgaagcaggaggatcacctgaactcgggagttagagaccagtctgggcaacaggtgaaaccccgtttctactaaaaatacaaaaattagctgggcatggtggtgcacgcctgtggtcccagctactcaggagtctgaggcacgagaattgctggagcctgggaagcagaggttgcagtgagctgtgatcgcgccactgcactccagcctgggcggcgacagagggagactctgtctcaaaaaaaaaaaaaaaatcaaaatcacatatggatacaaaatgtatagacccatgtaacacagatacatggagagaaaaaaaaaaaaaaacacatcaaaaggcccaaacaattggtcaggcatggtggtgtccccctgcaggcccaactacttgggaggctgaagcaggagaattgcttgagccaggagtttgaggctgtagtgagccatggttgtgctactacaccttagtgtgggcaacagagtgagaccttatctctattttaaaaacaaccacaagaaaaaaggccagtctcattggctgatgtgagtggattgcttgagctcaggagtttgagaccagcctgggcaacatagtgaaaccccacctctacaaaatcatacaaaaattagccaggcgcagtggcacatgcctatagtcacagttactcaggaggctgaggtgggaggattgcttgggcccaggaggtcaagacttcagtgagctgtgattgtgccactgcactccagcctgggcgacagagcaagaccctgtctcaaaaaacaaaacaaaaaacaaaaactgagcatatatacatagagataaatataggcttacaaatcacagatacataaacacagacacagatacacaaaattacacacgcatctcttttacaaagaaagcaaactcagaaacagacccacaaacgcatttgttcagactaagactttaaaacctatacagagaaacacacacaagcacagagactcataggacatactgaacctggacacatacagaaatcaaactctctcccattaaggagcagaaacacacagatttggttgtgtgcaggaatagcctcctttctacatttctaattccctgtctttgtaaccacttccattctgaaatgagttatgttcctgtcctagcccacaatggggtagaggttgcctgaaggtgaagccagggtttctgccagtttcggaaagagtcctgagggctccctggaaatacctttgaattgggggttgggcaaggaagagaagaaaggctgggatggtgggaagagagacaccaggaaaaatgactgatgggagaagaacaaaggcagggaagagaaatgaaaatgacatagcctccaggctcctgcccaccaagacccaggagtccaggcccccagcctcctcctccctcagacccaggagttcaggcccccagccccctcctccctcagacccaggagatcaggcccccaacccctcctccctcagacccaggagtccaggcccccagtctctcctccctcagatctaggagtccaggccacctgccccttctcactactggattcagaagtttgcgtacctgtcaggcagagcgcagccccaaagaggcagagcagaatgactctggggacccccattgccattgctgagctgggccacctgggacagctcctcccgctgtgatgtgctgcctggctggttctccttactgagtcctaagcatcccggccacccagcctggccagtatttcttcgtcccaccctccctatgtgggcgggtctcttcctaggtaatcgtgatggaaacagggtgatcctcagttgctggagatctacacttctgggtctgagggaggagagaactagaagtctggaacccttaattttgaatgattggtgtcttgttggccttcttccttcacccctcccagcactctgctctaatctgagggtggcacatatggccttttgacttcccttccctccccctaccccaacacacaccacccacacagcttccaatcctgggatgtctccacacccaaagacacgttcatcgtcccatcatctaaaccttctctgaaccccatctccccactcatccacacaccctcagcctccagcaccttcctgtctcccagccctgatcaaactaggctgggctagcgtctgtctcccctaccgggctgtgaactcttcgggggcctccaggaatgtctgagataccgtatgactgaacgaatgaatcaatgaatgaagacacaaacagagaggcaccaagagacatacagggagagacagacacaaaagagaaacagagagagaggaagagagagagagagagtgtgccttcgaggaagcaattacacatgagatgcagaaagacagacacagcctgctgtgaacagatgtgactgtgtagtcacacagacaaacctagaggtgaagagggacaccccgatagacacgacatgcccccaggtgtttcagaaacatttattaaatgaatgaaatcaagaagatggagatacagcagacaaccagagggtcactgtcccccgaggacacaggcagacacatgtggatgctcagacactcagcaggtgaggaggtccagaggaggccccagcaggtggttggtgctgaggcagagaccccaggctagcacctcctggtttgtctcacttcttgctgcctggagatgctgcctgctggatcaggctagtggatactagccacagagtgggcaccagccatgtgcagacacccagagtctcagacccacatctggatggcagagtccacgtaacactggtgaccaaaagagccttaatggtcccctcagatcgactaaactttagacaggtttcttcctctcggccctggatcacgctttttgtaggacacttactttagaaaacttgtacagtcatccctcggtattgttttctatttctattttttttattgttttttggtttcaaaatattttttatccaaagttgactgaatgcgtggaggtagaacctgtggatgcagaaccccatagacacagagggccaaatataattgcaaattctttctctgctccccccgcaccccctctctttttctttttgagacggcgtctcactctgttgcccaggctggagtgcagtggcgtgatctcggctcactgcaagctccgcctcccaggttcacaccattcttctgcctcagcctcccgagtagctgggattacaggcatgtgccaccatgcctggctaatttttgtatttgtagtagagacagaatttcaccatgttggccaggctggtcttgaattcctgacctcaagtgatctgcccgcctcggcctcccaaattgctgggattacagacgtgagccactgtgcccggccttctctgcgcctttgaaatgtaggtaaatcttctcctggtctcttgccagcgttacaacccaggaatgtctttttcaaggacctgggaattatccctttgaaatcatcaagggagatagcacccctatcgcccagtctctgtgggagggtaggagcctcactttgataattgacaatcagcaaactcagatggcccaatcacagagaaaaacatttgcagactcaggaataactccatgtgatggacacatcccattgacagaataactccatgtgatggacacatcccattgacccacctcccccattgtcctccaatatttttccattaactcacctagggcttaaccaccctagcatatttgtttcagtggagttgagttcagtctctttccctattgcaatctccttgaataaagtctgccttgcctgtgcaatttttctttgacagcagccactatggacactcaccaaactatgtcctcccttactgtcatcttgccaaatccctcctcttcccatcaggcctcacttcccagaacctgttttgcatacaaattattcttccttcctgattctccagtttctgccccaggctctcagtgggggtctatccagaccggggcagggttgtgctcgggggtctctggagagtggagtctggccaggaaggaggatggtttttctgaagcccccgtggaaggtggaggcactgaaggtcttcacagcagttgtcagtttcagggattgaggcttacagggtaggcagaccagtctggtgaatgcatgagtatgtgagtgctgtgtgcacttttgattctggtatcattcaggtacttttggagactttgaagtgtcagctccctgtaccttttgggagcatccatctggctgtcttcatctgcctggtgtctgagtgttcacgagtctgttgaatgccttagaattctgaatgccttagaatgttctcaaggatcttctgttgcattccatcagtttccacgcatggttccatttccaatcatgtttgcaaacatctggcctctcaaaattttttttcatatttgattttcataagcagtttactaaatgtgggtaccttctagggtttgtggcccaaatagttgagaagtatttagtatttcttgccttattggaaatgattccattaatcaaacaagtcataattgtaatgcgttttaagatattccctaagtaatgtgggtcatcccttgcttccagtcctcatgttctgcataaatgttatttcacacattatcagaattgtgaattttcttttggaactctagtcatgaccttgtcaaaaattggatcatgcagattgtatgccaatatattcttttgttattttgttatttttattttttgagaccgagtctcactctgttgcccaagctggagtgcagtggcgccatcttggctcactggaacctccgcctcccaggttcaagtgattctcctgcctcagcctcccaagtagctgggatcacaggtgcctgccaccatgcctggctaatttttgtatttttagtaga[148 bp omitted]catcaatatctctttctttcaaatcagatcttaattttcttttacagttcagtagtatcaagtgtattcatgttttgtacaatcaatatccagaacttttcatcttgcaaaactgaaactctttacccatcaaacaactcccctttcttctatccctcctccccacaccccctggcaagcatcattctactttgtttctgtgaatttgactactctagatcagggatccccaacccccggggcctggtaccagtacctgttaggaacggggccgcacagcaggaggtgagcggtgggtgagggagggaagattcatctgtatttacagcctctccccattacttgtactaccacctgagctctgtctcctgtcagatcagtggcttagattctcatagcagcgtgaatcctattgtgaattgcgtatgcaagggatctaggttatgcattccttatgagattataatgcctgatgatctgtcactgtctcccatcacccctagaggggaccatctagtggcaggaaaacaagctcagtgggccaagcgtggtggctcatatctgtaatcctagcactttgggaggctgaagcaggaggatcacttgaggtcgggagttcaagatgagcctggtcaacatggtgaaaccccatctctactaaaaatataaaaattagctgggcatagtgggcacgcctgtaatcccagctactcaggaggctgaggcaagagaatccttgaacacggaaggcggagcttgtggtgagctgagatcacaccactgcagtccagcctgggcgacacagcaagacaccgtctcaacaaaacaaaacaaaacaaaacaaaacaaacccaacaagctcagggctctcactgattctacattatggtgagttatataattatttcatcatatattacaatgtaataataatagaaataaaacgcacaataaatgtaatgctcttgaatcatctgaaaccatcccccactccccaggtccatggaaaaattgtcttccacacaatcagtctctggtgctcaaaaggttgaggaccgctgctctagataactcatataagtgaagtcatatagtacttgtcctttagtgactggcttatttcacttagcataatgtcccgaaggtataaccatgttgtatgtagcatgtgtcagaatttccttccttttaaaggctgaacaatatcccattgtgtggatacaccgcattctatttattcattcatccttccatcaatggacactggggttgtttcgcctctgggctattgtgagtaatgctgttatgaatatggctgtacaaatatctgtttgggaccctgctttgaatttttttggttattatatcaaatcattttgaatgttgcacgctcttgtggaagtgcccctcacctcattttctttcttttcttttcttttctttttcttttttttttttggcagagtttcgctcttgttacccaggctggagtgcaatggtgtgatctcagctcactgcaacctccgtgtcccaggttcaagcgattctcctgcctcagcctcctgagtagtagctgaatttacaggcgcctgccaccacgcccagctaatttttgtgtttttagtagagatggggtttcaccattttggccaggctggtctcgaactcctgatctcaggtgatccgcctgcctcggcctcccagagttgggattacaggtgtgagccaccgcgcctggcccaccttctaattttcaaataatttgtgatagctgtgctcacctgtgttgttgcaggctaggctctcctgggaggcagattgtgaggctgagattagcatgcaggaccttgggatcaatagctgcataaaggaggcaaaggaaactggattttgagcagagggtgagattgggtcctgattcagtcaatccaagggttcagtgcaccccagggggaggtctggcactgggcttctgggttctgatcagctgaggcaatgcccaaggggctgacatcagaagcagctgtcagagtccttcattcctaaagagatcttggtggcaaatcacagcatccaccacattctactcatttctttgttttagtgtatttttctccatctccagtgtattttttccacctctttgaaataaacattaattacagaatcctttgagattaaacaaagttacctgatctggtcatttattcctcagttgaaaaaattgatgtgaaactacttttctgtctaccgttactgtcttttggaagttaaatgctcttttttttgagacagagtctcactctgttgcctaggctggagtgcagtggcgtgatcttgactcaccactgcctcccaggttcaagtgattcttatgtctcagcctccggagaggctgggattacaggtgtctgccaccacgcctggctaatttttgtatatttagtagagacggggtttcaccatgttggccaggctggtctcgaactcctgaccccaactgatccactggcctcagcctcccaaagcattgaggttacaggcgtgagccactgcacccagcctaactgctcttatttaaggtgaataatttttaagagtttaaatttaagggtttaatatttaaatattcacatctaaagagtttaatatttaaattaggtggctgggtacctggattgacgaaaagaacatgtaattaaagggttcgtttattctccatttttcctgtcttccagttatttcttgaattttcttttcttggcttacccaaaagtggaaggagtaaattcatggtctgttctgctcaataattaatggatctgtgctacattctgccaaaatagcagctgtggaaattttttccccttgcaactttgtttttctcaaaaattcattcaatgatccactttgtttcataatagctttccattttctggtcctgattattttttgtccttgatagacatcgaataaggttaatattttatcttagaattttagcatcttacaatactatgtaggcaacaaatcattaaattttcataagtttatttttatactgatgaaatttctaaagcaataataagcaactactataatagtataattaacagacttgcataatactctttaatttcaacccacacacattctttgtggatgattaatggtaaccggatattagtttgttgtgttattgttgttgttgttttgagacaagagtcttgccctgtcacccaggctggagtgcaacggcgtggtctcggctcactgcaacctccacctcccgggttcaagtgattctcctgcctcagcctcccgagtagctgggattacaggcgcccgccactacacccggctaatttttgcatttttagtagagacttggtttcaccacgttggcaggctggtctcgaactcctgacctcgtgatctgcccacctcagcctcccaaagtgctgggattacatgtgtgagccactgcacctgaccggatattattatacagtgatttgtgccaagtgaaaggacttgtagatttatttatttatttaagacagagcttcgttcttgtcacccaggctggagtgcaatggcgaaatcttggctcactgcaaccttcgcctcccgggttcaagcgattctcctgcctcagcctctgtaactgggattacaggcgactgccaccacgcccggctcattcactgggctaatttttggtatttttagtagagacagggtttcaccat[137 bp omitted]tctggtagagtaaataattagatgaaaatatgaactgcaatatgaaatactgaatacagacaatgtgctggcaccattagggactttaacaaaatgttctgcatatcaggtggaagagcagctcattgtttagaagcacagactattttaaatgacataaaatcaacacgtctttccatttcaaaaccaatgtctccttagtatatggaagtagaatggtagctaccaaccctcttggaacaagacactttactgccatctgctggaacatagttgcaataaattgtaaatcacttttgcaaccgtcaatagcatgcacaatacataataattttcaaaaagttgttttcaaaatagtaaagatgtctgtgatatgaatagcacctccttaggtgtagtgttcttgtgcagtgcccaacatgaacaactgcacatggtgacagtagaatcatggcatctgcaaaacaaaatccattttactttttcctctccaatctttatgccttttttttctttttcttgccttattgtataggctagaactcccagtacatgattgaatagaattaatgagagtaaacatgcttgtcttgctactgatgttatatagtcgtgtgttttttttagacagggtctttctctgttacccaggctggagtgcgctggcatcatcatgggtcactgcagcttcaacttgctgggctcaagtgatcctccctcctcagcctcttgagtagctgggaccacagttgcatgccactgtgcctggctaattttgctagtttctacccttcccttccgttccctcccctcccctcccctcccttcccctcccctcccctcccctcccttcccctcctctcccctttctttcccttcccttcctttctttccgtttttctttctttctttcttttttttggacagagtctcgctctgttgcccaggctggaatgcagcgatcttggctcactgcaacctctgcctcctgggttcaagtgattctcctgcctcagcttcccaagtaagctgggattacaggggcctgccaccacgcctggctaattctttgtacttttagtagagatgcggtttcaccacgttggccaggctggtcttgaactcctgaccttaggtgattcacctgcctcggcctcccaaaggactgggattacaggcgtgagccactgcgcccagcctaacagaaaaatattttttaaataatagtaaatatataccagaccacccacagcgtgatcaaacacctttctttggcagcatttgtgtagtttctaatacagctttaaaatatgttcataaagaattattaaatatcctttgtatttatattttatttagagcctggagaaggctctaaataaaaggtgagaggtgaatattttgagttaacttgatataagcaaggtttcacagattaactttgaaatataggatgacatggggctgggtgccatggcttatgcctgtaatcccagcatttgggaggttgaggcaggatgactatgacagcttgagcccaggagattgagggaaaaaaaaatggataacatggaatagttgagaaacgtgacatcatgaaaataaaggtgatttttctaaattttattgcaa[139 bp omitted]agggcgaaactctgtctctactaaaaatacaaaaattagcctgatgtggtggtgggcacctataatcccagctacctgggaggcaaaggcaggagaatggcttggacctggaaggcggaggttgcagtgagcagagatcacgccactgccctctagcctgggtgacaaagggagaaagaaagaaagaaagaaagaaggaaagagagaaagaaagagggaaggagagagggagggaggaaggaaggaagggagggagggagggaggaaggcaggcaggaagactcattgatcatccatatagcaattatgtggatcaaaattgtcaacatttgccatatttgcttattctatctctatcttctgtgtcagcctctggtgcataggaaaccacaagcaaaatgtaggggcttaaaacatcaagcattttacccctctccaaatcctgtgtgtctcttgggttgttcttctgatatgggctggcttgactgatttctgctgggctctgtcatgtgcttgtggtcagctggagggttgggtggtggctggatgacccagaatggtctcactcacaagactggctgtcaggcaggcctcagttctcctccaaatggctagcttgaactttatcacatgggagttgcaacgttccaaaggggagcaaaaaagagcaacccctaataagcaggtgcttttcatgcctttgcttatgttatgtttgctaatgtcccatgtcccattggccacagcaagtcaccagggtatcccagagtcagtgcagaaggacactaacaaaaggtgtggatagagggaggggaatgatttgtggttattttttctatctatctatctatctatctatctatctatctatctatcaatctatcatctatctatccatccatccagctatctatcatcattatcatctttatcatctattatttgtctattactgttgaaccattaaaagcaagttgcagacatcttttgcttcactcctaaatataaattctggcataggcaagggtctttctccaattcaattcttcccttcccttcttttcagactatttttaaagggctaaataacttgaaacttgatcgttcatctcacattcacacaataattgtgacagtgataaagaacatgcagggaagacctacaaggccaactaattaaaatatttaaaaacattcatttttacccacaaggaaatcgtaggtttgagccacaacatttaaccagatttcttggagctcaaaggcagttctgcagtcaaatttatactcttttaactacacgcaaattaagggacagatgatgcagacatttctaggaaaagagtggtaacttctaggtcatcaccatggaaatgggtggtaacttccgggtattgccatggcaatggtaaactgacatggcacactggcgggagtgtcttatggaaagctgcttccacccaggccctgttttagctggtcctcaattaggtctggtgtctgagccccacctccggaatcaagtcccacctccgacctcataaagatattaaggacactgtaagaataaattcctgccccattcaggagatgtcttgtgtaattacgttactatgaggtagctggctggtctccttgagaagcagttgcatatcaagtgctcaggatcagcctctgctgctagcagattgggtactcagtagcggcggtaacttgattagtttcagtgaaaggtagcccctgcatggtgccctcccacagtaatgagtttatgcaagatctggttgttaaaaagtctgggaactccaccgtctctctctcgctctctctcttgccatgtgacacacctgttcccccttcgtcttccaccatgattgtaagcttcctgaggcctcaccagaagcagatgctggcactatgctttttgtacagtctgcagaactgtgagccaaataaccttctttccttataaattacctagactccggcattcccttattgcaatgccaaacagactaacacacaggcatagctttcacccttgccaccatggccactctgttcatgagaccattgaaccagcatggggctggctgaggagatggactgacttactttcatgggatggatcatccctgttgttaagagctttctttgtggggattattgttgtatttatttgtgtatttatgtatttatttattgagacgctgtttcattctgttgcccaggctggagcgcagtggtgcaatcttggctcattgcaacctctgcctcccgggttcaagtgattctcctgcctcagcctcttgagtaggtgggattacaagtgcacaccaccaagcccggctaatttttgtatttttagcagagatggggtttcaccatgttggccaggctggtctcgaactcctgacctcaagtgatttgcctgcaacggcctcccaaagtgctgggattacaggcatgagccactgtgcccaaccaaggattatttttagtaggaattaggatgagacacatatatgcatgcattttgtatgtacgcccataaatgtatccacatacttcttcctagacctacttgcccctgagcttccagtctcattccttacaagatcctgaccaaacagaaagccatgggccatttcccaggagcccatgtatatctgcacattgggccacatctcactccaatttaagtgaaggggccaggtgtggtggctcagcctgtaatcccagcactttatgagtctcaggcgggacgatggcttgagcccaggagttcaaaatcaatctgggcaacatagggagaccccatctctacaaaacattcaaaacaaattagcaggtgtagtggtgcacacctgtagtcctagctactggggaggctgaaatgaaaaaatcacttgaacccaagagattgaggctgcagtgtgctatgatcctgccactgcactccagcctgggtaacagagaaagacctgtctctaaaacaaacaaacaaacaaatgaagtgaagatctccaatcacagctctgtacaccaggatttaccttcaccactgcctgtaggacccacctctgagtagtggtcccgtaatatgataatttaggttcagcttccaaaatacatcagtcacactgatccatctgtgagccagaccttttcttccttaatattctacaggaaaatcttcatatgatgtcatgaatgtgaattaaaggaacaacatagctgcaaccaaggtcagtgacatgagagtctgagctgtctgtgtgtgtaactcttttgtgccatctagatctcttacaatgaattaatactgtgcccaaatcgcactatgacttagtgggttagatacccaactcatgacaggtagttttagtcatatagatacttgatgtcccatggtcaaaatcacagactctattagtactcagcagctggttttcaaattgaaagcacttatatgctgcataataaatggacttacttcagaaccttacgggctgtaattttgcttttgtatcttgccagagactccacataacagcttcaaccattatggatagaggtgacaccatcaaagttgctgattcatgtggctcagggacagggagattgcatcgcaggctttacctgctgtagagctctcacctgctttgaaactcagcagccttcaagtttatctgaaaaatgagtcagaacaaaattccaggccagtcatgatgggtcacgcctgtaatctcagcactttgggaggccgaaagtggggggattgtttgaggccaggagtttgaggccagcctgggcaatatagtgagaacctatttctaaaaaaaaaaagaaagaaagaaaaaggagtttgagaccagcatgggcaacacacggagaccccgtctccacaaaaaatttaaaaactagctgtgcacggtggcatgtgcctgtagtcccagttactcgggaggctgaggtgggaggatctacttgagccagggaggtcaaggctgcagtgagctgtgatcatgccactgcactccagcctgggcaatagagcaagactctgtctaaaacaaaaacaaaaccaaaaaccagctataaaagacacctagaactattaaaaaaagagaaaaaaagaacactattctgaagtgtgatttatatatgtatcatataaatcatatatgttatatataaacacacatctatatatacccatctattatttttattttattttattttatttttgagacggagtttcactttgtcaccctggctggagtgcagtggcgcgatctcagctcactgcaacctctgcttcccgacttcaagcgattcccctgcctcagcctcctgagtagctgggactacaggtgtgcaccaccatgcctaatttttgtatttttagtagagatggagtttcaccatgttggccaggctggtctcgaactcctaacctcaagcgattcacccgccttggcctcccaaactgctgggattccaggtgtgagccaccacgccccactctatctatctatctatctatctatctatctatctatctatctatctacctatcatgtatctatcactttcaaatgtcaaagagccctaccaaattatgtgcctgtttatcagtttaggaagtgtgagttgtaataacttattctttaccttaagggagatactatggcatgtcccagatgattggacttctaaaatcttcactgatgtggtaagttagtgaacattcatgaggtttatctccctctttctgtcactcatttgcattactatggcttctacagtgattgccacttcctgatcaccaggtcaaattagcatgattttattggtggaatgaaccagtgctatgttcttcagaatgtaaagatgatcaaggcctctgtggactacaatatgacggagattaggagggttatcaggaacctggggcaagacagtgctgcagtccttaccatgcacacatgaatggcttttaattctcctaaatgtcagagatcaagtaaaatacatttgtcagatcattaagcacatactaaggaccaaaaactaggttggtcaactccagtaaagatgtcacatctgacatagcagctgaaattggagctgctatttgtttacatttaaagtagtcactatgaattagctttggccacataataagtgatacggtttggctgtgtccccacccaaatctcatcttgaattgtagctcccataattcccacatgttgtgggaggaacccggtgagagataactgaatcatgggggtggtttcccccataccgttctcatgatagtgaataagtattatcagagctgatggttttataaggggaaaccctttttgcttggctctcattctctttgctggctgccatgtaagatgtctctttgttctcttttgctcttctgctatgattgtgaggcctccccaggcatgtgtaactatgagtccattaaacctgtttttctttatcagttacccagtcttgggtatgtctttatcagcagcatgaaaacagacgaaaacaatcagtaaccccaaaactcagaggcttgaaattacgaatattatttctcacaattctgggggctttctgagcatttcttttgctctgggctggtttggctgcagctgcatagtatagtcaggcctcactcaaagttctaatggttggttggttattgtgggggagggggcatgagaatgacttggccttatgtttctcatcatccctcagtctagttcacgcttgcatgaacccatgggagctgggttcaaaatgcaacaagaaagcagtttccattcagtgagtgtttttcaaacctctatatgtcacatttactactgtctcaaagaaaatcaaatgcacattcccagattcaaggagtggagaaattgactccacctttgaagggaagagctgcaaagtcatgttgcaaagaatatacacacaggaatgggaagaatttgtgggattttttttcaatctaccacatccactagcttcagtcatgcaggttttttgcaggggccaagtgaaatgaatggaggtatgatagggacaaataatcctgcatcctctaaattttgatgatgatgcaatctctgcaattcctcccacagcacagtattgagtttcaagggtttccacttggctctttataccataaggactttatttattttttttttttttgagatggagtctcactctgtcaccaggctggagtgcagtggcgccatctcagctcactgcaatctctgcctcccaggttcaagctattcccctgcctcagcctcccaagtagctgggattacaggtgtgcaccaccacacgcaagtaatttttttattttagtagagatgaggtttcacctttttggccaggatggtctctatttcctgaccacatgatccacccgccttggcctcccaaagtgctgggattacaggcatgaactactgcgcccagcccataagtactcttagttcacaagttaggaagccactataatgagttctaccagaagatgagcatatctatcccaaatatatgttaaaggatagaggaaaacaaccatagggtgagttcatggacttactgaactcactgtgagatcagacttgggccaaacatggataagtaacaagcttgaaatcctatcacaaggatcttgagggtctctcctggaaacactcctcttagcttacattgcctacagggaggaccctgagaagaagtttctgtgctattattttatcagccggtacagttccagggaagcaggagagagggaaaagtatagtgtggtagggaaggagacaacacttgtatgaaggtcttactgagctggccactgcttgctatcaagtgtaattgattgtttaattttgtgttttaagaccacctagctgaggagaagaagggaggtgaattcatccactggttcatgaaatgtttgtcccagagactattaactccgctgtacttccaggtcgcgtgtgaatagttcaatgggttctgtaacgtctcatgcatcagcatcaacaggaaagccctggggcttgagacaagtagtgcccattgcaggcatgaggtcaggtttcgttgctgcttgtgcccatgtagagttgttctgagttcatgcagggatgttgctgcagcagtgaatcaagagaaacaagtttccagaggccccaggcacaggtgaggctgagaggatctgaagtgacacataagatgtgtctgaactctttcttaattcaactcttgcatgcaattatctgagcctggtgatgattagagtttaaattctaaactactgatgctgtatcattaatgactaattgtctattattaaaagtttctgtctcttcttgtcaattctttaagttatagctttctaggaaattgaccatttcatctgttttcaaatttattctaattcaaaaaatattttctattcttgtgtagtctttttctttcttaatattatttgtgcctgttctcttttttattcatcttttgaaataatctattttttaattatctcagaaatggatcacttcaaataagcagttgttggcatttagcctctattgcatcagtgttttctatttctttaacttgtgcttattgttgacctcaaccaactttctttgtatttattctattattctgtgttctaacttcaagttggacatagccttcattcttttcatttttcccttcttcttcttcttctttttttttttttttttttgagatggagtttgctcttgttgcccaggttggagcgtagtggcatgatctcagctcactgcaatctccacccccagggttcaagcgagtctcctgcctcagcctcccgaggggtctaggagattagtgattattagttctagcgggttacagtgaccggtagcacaggagggattggcttcctttttctgaaggtgaaccgggtcttttctgtcctttttctaagtagcttaaataacacatggtcaataggcacaattttcacaggcctctaactcatgacccactaatcccctagacccccgttggaaaaaaggagaacgtgtaaccctggagatcgatgggtcagggctaaacccccaagttgcctttttagtttgaggggaggtacacaggcactctcccaaaccagtgtttcaaactttttatgatgagccgaatctgccaacaccagagcttccaaaaaggacaaaagaacttgtttctccagctagcggaaagtgtagctcatttcctcaatgttactttctgttatgtatgtgagggaaccactatgggagactgatggccttgggaagctagagagttggtgcccactgatccagttcctgacccaattccagttcagaaggcccaaattagcaacttctgggtcctaaaaacttcaattattggacaatactgtgtagctagagaaggaaaagacttcaccattcctgtaggaaagctcgattgtctagggcacactccagctgtcactctacacacaaacccacacacttgtgtcacagtcacagattcattccagtcctgtcatacaccaagcactttcttctttttgacacatacacacagtctgtcatacaaagagaaacacacctgctgtgtcatgagcacacatgcagtcacgaagacataccctggccatttcatgtgcacagatgcacacacaccccattccctgtgtcacaagacatcccagccgtggcacgtgcactctcatacagacgcaacgtcaccattcgcacggtagggcacatccttggctctatcacgcacataatattgcacacaccccctacaccatgtctgtcaccaccacggacggtccatcacacgcggccagggagacgcctgacctcgttttgccccaccccctccctcaagtcttcatacccagccacactgtcgccttcttcggctgctcgcattcgcctcattgcttctcccacccttacccgcactgccgactggggcatgagtccgcaacgccctctgcgcctcgccctgcttcgatgtctccttccgaaactacacgcggaacccaagaatcactgggatgcgcaaagcggatcaggagcgcacgctcattcggcccagtgacctgtgggaattgtagtcccgggccggaaacgcaggagacgccagaaacccaagtttgggacggcgcgtcccaagggtttctggaagttgtaacctgtgctccgagtgcgtaggcgcaggaacccttcgggggaatccctttagcagggagcgtatattgaagagtgcgtgcggaggtgagagcaataaactgataacggaaacagatggcatacttcgttttcagttatcaaatttcaaaaactaaaaatgtagatggtacacaatattgttgagaatgtggggaaatgagagctttcacacgtagtgggtggaaatgactacagctcttttacagttttgtgtagtagcattcacgaagtgtgaaagcaaacccctaagcaaccagcatttttacatacaagaatctagcctacaaaaatgctggcatgaaagacaaagatgtgggtacagtaatgcttaccaaagccgtgtttgtaatactgaagaattcacattgtaatactgaagaacctcaatgttcgttttttgagacactgttagtctgtgctagccaatatgatagctatttgtggctatttaaaattaaatctattaaaattaaataaaattcgaaattcagtttcttacactagccatgtttcaaaggctcattagccaagacagctagtggctactgtattggacaagagggatataaacatttctaacatcacagaaagctacattgaacagtgctgggttaggtaataattcaacgttaaaaggaatgaattaaatctataactgacatgaaatgaagtagaagaatgtgttgaagtggaaagggcaaatggcagaattatatggatagcatgatcccatttctgtataaaatagctgtgtctttatacatacattcagtgtacagaaaaatctggaagaatacctgaaaatattaactttggtcatttctgtagatagggaatgagtagggggacactttcatttctgacattatttatcatcagttatttgaatatttaaaaactgcaacaattaactgaatgttgctaaatccaaataaatatttttattacttattttgaaagatttttggctgccttctactatctcagcgacgtactctttcttgaaatactgaactactttagcttaatagacctccctcatttctgttttatctcctcactgaaaagcattagaacatctctacagctataccactctgaatgctcccgatctggtccgaaaagcattagaacatggaattacttgagtgattaaaagtaaaacaataagaaattgattgtggcatcagaaaaagtgaaatcagttggatcaatttaaaatcccaacataagttttttttaaaacgtttttctttttactttgtaattacaaaagcaatgcatgtttattacatgaaatatgaatatagaacaagtgcaataacagaaaagatccctgtagcccatggagtggctgaaaatgatgattgctagtgggtattggtgtctttttgggcaatgaaaatgttctaaaattgattgtgatgatggttgcatagctctttgaataaactagaaactactgaattcggccaggcacggtggctcacacctgtaatcccagcactttgggagactgaggtgggcagatcacctgaggtcaggagttcaagaccagcatggccaacatggtgaaacccctgtctttactaaaaaatacaaaaattagccaggcgtgatggcaggtgcctgtaatcccagctaatcgggaggctgaggcaggagagtcgcttgaacccaggaggcggaggttgcagtgagctgagatcacgccattgaactccaacctgggcaacaagagcaaaactctgtctcaaagaaataaaaaagaatctactgaattgtacactttaaatgggtgagttttagagtatatgaattatatctcagtaaaagtattacagaaaagcaataatctcagtgagctgagatcacgccattgaactccaacctgggcaacaagagcaaaactctgtctcaaagaaataaaaaagaatctactgaattgtacactttaaatgggtgagttttagagtatatgaattatatctcagtaaaagtattacagaaaagcaataatctgtgttaactagttaaccacctggaaaaataaagtaacttccatccctcacacattaaaacaaataatgttcacgacatgtataacttaaaaatagactaccagagtgcttatcaaattacaaattgatgttattataattttggtctgtaggcttgacagccaaaacacaaattatgaagtaaatagttaataaattatagaaaatataaagtatgtttcagtaaacttccctgcctccctcaaatttaagtagcaaataaactaagggaaaatatttcagatacaacaaacagataataaatttaaaacaaatcaacatatagatgaatacaaaaatgtgtagaaataggtaaagaatatagactcttagaaggaaaaattgaaaatgaccaataaatacttgaatgcatatgtaagct[136 bp omitted]catggagaagccccatatctactaaaaatacaaaattagctgggcttggtggcgcatgtctgtagtcccagctacttgggaaggctgagggaggagaatcgcttgaacctgggaggtggaggttgcggtgagccaagatcgtgccattgctccagcctgggcaactagagcaaaactctgtctcaaaaaaaaaaaaaaaaaagaaagaaagaaaagaaaaaagaaaaagaaaataaaatgttatcattggtttaaggactgggaaatggtcaaaacaattgtaaattttaagaagatattcattcacaatacttttggtgggaggaatccacttacaacctttctgagagtaactttacataaatatttaagagaagcatctcttttaattcaggaatccatttctagaaatgtagtccaattcggcaaagtttccgacgtacacaaattagtagctcttctatgcaccaacagcgaccaagctgagaatcaaatccagaactcaacaacttttacaacatctgcaaaaataaaataagataaaatacttaggaatatacctaaccaaggaggtgaaagacctctacgaggaaacttcaaaacactgctaaaagaaatcatagatgacacaaacaaatggaaacacatcccatgctcatggatgggtagaatcaagattgtaaaaatgatcatactgccaaaagcaacctacaaattcaaagcaattcccatcaaaatactgccatcattcttcacataactagaaaaaacaaccctaaaattcatatggaaccaaaaaagagcccgcatagccaaagcaagacaaagcaatggaggcatcccattacctgatttcaaactataaggtcatagtcaccaaaacagcatagtactggtataaaaataggcacatcgaccaatggaacagaatagagaacccgtaaataaacccaaatacagtcaactgatcttcaacaaagcaaacaaaaacataaagtggagaaaggacgccctattcaacaaatggcactgggataattggctagccacatgtaggagaatgaaactggatcttcatctctcaccttatacaaaaatcaactgaagatggttaaggacttaaatctaagacctgaaactgtaaaaattctagaagataacattggaaaaagccttctagacattggcttaggcaaggattttgtgaccaagaacccaaaagcaaacgcaataaaaacaaagggcctgggacttaattaaactaaagagcttctgcgtggctaaaggaacagtcagcaaagtaaacagacaacccacagagcgggagaaaaatttcacaatctgtacatctgacaaaggactaatatccagaatctacaaagaactcaaattagcaagaaaaacaaacaatcccatcaaaaagtgcgctaaggacatgaatacacaattctcaaaagaaaatatacaaatggccaacaaacataagaaaaaatgctcaacatcactaatgatcagggaaatgcaaatcaaaaccacagtacaataccatcttactcctgaaagaatgtctataatggaaaaaaaaatagatgttgccgtggatgcggtgaacagggaacacttctacactgctggtgggaatgtaaactagtaaaaccgctatggaaaacagtgtggagattccttaaagaactaaaagtagaactaccatttgatccagcaatcccactactgggtatctagaggaaaataagtcattatacaaaaaagatactggtacacacatatttacagcagcagaattcacaattgcaaaaatgcttaacaacccaaatgtccatgaatcaatgagtggataaagaaactgtggtagatatatacagttgaatactactcagccataaaaaggaatgaattaatgcatttgcctggatttatttatttttccttttttttttaagatggagtttccctcttgttgcccaggctgtagtgcaatggcgctatcttggcttactgcaacctccacctcccaggttcaggcaattctcctgcctcagcctcctgaatggctaggattatagacacccaccagcgtgcccggctaattttcgtatttttagtagagacagggtttcatcatgttggccaggctggtcttgaattcttgacttcaggtgatccagctgcctcagcctcccaaagtgctgggattacaggtgtgaaccaccatgcccggcctggagactattattctaagtgaagcaactcaggaatggaaaatcaaacatcgtatattctcactcataagtgggagctaaggtgtgaggatgcaaaggcctaagaatgacacagtggactttggggacttgggggaaagggtggaaagggggtgagggataaaagactaaaaattgggtgccatgtacactgttcaggtgatgggtgcaccaaaatctcacaaatcaccactgaagaagttactcatgtaaccaaacaccacctgtttcccaaaaacctatggaaataaaaaattaaaaaaaaatcagacccccaaaatattcagagtagtacttgtgggagtcattgagcaagtaacatgggaagagaggaggctgcttccaccagtggttttggaggtggagcagatgctgatgataatgaagtcccagatgggaaacggggatgggtgccgaggaaagctcaaggaccctgcagatgaggactcagacccacgatactggatgaggcatccatgtcaccatgggagtcaaccagggtagtggcctcagctgaggcaggggaaaagctgggatccaagagctctagtcttctcttgataagcaagagagaccaggaggtgagagatggcagaggatgagagaggtgatatcagtgaccagaaagagcccctaaaaagtaacttccttttctttctgttagttttaatataaaatttcgctttaatatttttagacaattcttttttaaaaaagtatttatatccaaaggttcttaccacaccaaccacagccccaatctttttgccctaacctcagaatcagttagttgtctcctttaaaacctttctctctctcacacacccacacacacacacacgcaaacacacaggagagagagagagggaatatatagtattgtttttggagtatgagtgtgtgcttcagaataaatggtttcatactctataaaaaatgagattcaaattttataatccatcaagttttattggaacacagccatgctggattgcttgtgcattgtttatggccgcctttgcactgccataagtctccacggtcacaatatccactcactaccacttattgttgtctttcaacagcggcatataaaatctgtaacacagttcatctcacacctaataaaacagactcacacaggcataaatttagaaaacatcccatgaacataaacaggtccacgcagggtcccagacaccgaatcgaactaagaaactccctcacagcaagacacacccatctgttcaattgccagacactgttccaggcgctcatacccaggtaaactggtagtgtcgcgcaggtcatttccagcgaacttaccccggattcccttgctcgctcacgtctaagtccccagacaccccagtcccatcttcgcctgttctagactccagaatgcgttccttagcgaaagctgagaaccttttaattcgctctcagtcaacaccaaagaccctcaagcaaaagcaagagctcccgggcgtcttcgaaaaaagcgcctttgacaggtgaagccaagttgcatgctgggagcatccctgctgtccaggtttcaacttccggagactctgccgctgtggactacatttcccagaagtctccggggcacaggccttttaggggcggggcgagcttgcctgccagaagctcctctcccagcctgcgagcatttccaggctcttgtttcccatcagcctctgggtccaaactaaccacaggtctctgggtccttttccggtgtccttaaggttcttggactctgcatggtgagttggtcgtgtctgtagaagtaatcagcccgggtgaagctgggagggctcggctggctttactggggcccgactggaaccggcagtgagggtgggggtggcatcgggggtgctggaggtggggagggctgggtcacggacagagcgtgtcgtgtccggatcctcaagcctgtgtgcacgcgagcagccgagggacagtgtgtctcagacggcgtggcagggacggggcgtgtccccacggaggtgggtgcagttgtgaatgtgtgacgggctgacagggtgcgtggccgtatttgtaaatgtgatttgctttgaccaaatgctctaggttccctttagcctgtcttcgggcctgccacaattaaatgaccgcaagaaagaagtctatgctaagccccataatgaacgtttcaagcaagaaggatgagaattttagatctggaagtgtccgcgggacaggatcttgtcaagacctgatggggaagttctagaggtgggattcctagaagaggggcctctaggagctctttggtggtgagctacatgtttcagagccattgcaagcagacctctgtccccaagaattgccctcaacacagagacagactctagcctcccttttcattccgtttggttttgtgtggatgaaggcagaagtggccccagagggtgttttgctcttctttttcttttttaattaagtctgtgacgcgctagaaatgctgatgtctcatgttactgttttttcccccagtgctgccaggttgccagatttctaagaaggagtttgaagaggagaaaaggatttttgcatgtttagaaatcaaggttcaggtgaggttttttatacatactttttaaatacatacacatacaattacctttgcttctaggtcatgagaacattttctttccttggcctgaaatatcttgactgggttttcccagttacatgacccgccatgctggtacatatttcctcccagtggccccctattgttcttctccacaattcttacccacctgttcatatggcaaattgttcaaatacttcagtgcattatgatgcactgaagagttatagaaaggcacctcttgtagattgctattagagcattattttatactatgattatttgaagagattagtaattaggtggtgttatataaacattattttttatcttttctgtagtcataattaaaatttttttttaactttttttagagacaaggtctcactctgttgcccaggctgagtgcagtagtatagtcatagctcagtgcaaccttgaagtcctgggctcaggtgttcctctggccttggcgtcccaaagtgctgggactgcaggtgtgagccaccatgcctggcccatagtcatgatgcttaaagaaaggcaaggtataagggattttaagtaagggaatgtttctggcagtaaatgacaatgttgtctgctttgtgaggcttttaggggtggaaatatgattgagctttgaacatagggatttgtaatttgcaccaacaagagtggggactttcagataatctttagatagaaatctgtaacatttccaagcatgacttgtttgaagtccagctttctgtggcatgta[136 bp omitted]cggtgaaaccccgtctccactaaaaatacaaaaaattagctgggcgtagtggtaggcgcctgtagtcccagctactcgggaggctgaggcaggagaatggcgtgaacccgggcggtggaggttgcagtgagccaagattgcaccactgcactccagcctgggtgacagagagagactccatctcgaaaaaacagcaacaacaaaaaaattaaggctctggatccaaagtatctgaattcaaatcctggctctgcctgttggtagctgtgtgtgcttagacaattgattcaggccctctgtgccacatctataaaatagggacaggatagtacctacctaatggagttgatatgatgtaagatgagatattatatgtaaagcttcgtagagcagtgtcatccccatgatatgggcttactgaatattgagttgctattattgggctcttctagattatttcccataaactttttatagattagagtaacagaagtatgaagttgattgtgacgggtgcttgcaaattaactaaaaaagtgggggctgggcacggtggctcacacctgtaatcccagcactttgggagtc[135 bp omitted]gaggcaggagaattgcttgaacccagcaggcggaggttgtagtgtgccgagatcgcgccactgcactccagcctgggtaacagagcaagactgtctcacacacagacacgaaaaagtgaccacatgctcaaatgatctaggacaggaacactttttttgtttgtttgtttaaacaggttcttggccttttgcctaggctggagtgcagtggcatgatcatggctcactgtagccttggcctcctaggctcaagcgatcctcccacctcaggctcccgagtacctgggactacaggtacgtgccacaaagcctgaccagtttttgttgtattttttatagagagggggttttgctatgttgcccagcctggtctctaactcctggactcaagtgatctgcctgcctcgggctcctcaagtgctaggattacaggcgtgagccactgtgcccagccttacgacaggaagtcttaacctgaggtcttcttgttccattgacgagcttccaggtgaccaaaatcccttgaaattgagactaaatttttgtaaatatgtgtaaatgtgtttttttaagtgggcaaagtgtctataatttcatgagattatcaaaagtgaccatgacccaaaaagatctagctccattgttctggaaaaaagactgtaattgccgggaaagagcttgaaaaatattagtgtccagctgggctcagtggcttatgcctgtaatcccaacgctttgggaggccgaggcgggtggatcacttgaggtcaggagttcgagaccaacctgaccaatatggtgaaatcccatctgtactaaaattacaaaaattagccgggcgtggtggcgtgcacctgtagacccagctattcaataggctgaggcaggagaattggttgaacctgggagacagaggttgcagtgagccaagattgcaccactgcactccagcctgagtgacagagcaagactccatctaaaaaaaaaaaaaaaaaaaaaaaaaaattagtgtccaatagaatggaaatagtcaagtaaattgcagtatgtctagtgatggaatgatatgcacctaataaaaattaagtttataaagagtcaaaggaaggaaaaatataaatgatataattttaagcaatcattatagttatgaacaaaagtgctcaagaatattgtgttatgtgtcaatcccatctgataagacacggttttggaagacatatttcaagaattacattaaaatgttactttaattggtcattcactgaagaagtggaaaggtgcagccgtacttacagagtatctactctataccaaatactgttttgtttatgcacatttattttcttcctcagactttgaaggtggtttatctcatttgtgttgatttacaggagaatcttgacagtgaatgtgtctcattacattgaataacagctacaggatgttcgagagctggtaggtgtaaattgtttcaggcccactgattttcagtgttggccccgtttgttcagttttcttaatgactggaatatattcctcctgtcactcagttttttacatttggaaatgtctttatagttccaattatggaattaatgcaggcttggtccaaaaaaaaaactcagcggtccaggagacatatagagaaggaagctaaaaattgcatcctctagagttaatcatttttaatgttttggtgttttttttctttttcttttttgagatagtttctcattctgtcacccaggttggagtgcagtggtgcaatgtcagctcactgcaacctccacctcccaggctcaagcgatcctcccacctcagagggaaggtagctgggaccacaggtgtgtgccaccatgcccagctaatttttcatgtttttgatagagatggggtttcaccatgttgcccaggctggtcttgaactcctgagctcaagcaatccgcctcctttggccttccaaagtgctggaattacaggcgtgagccaccacacccagcactttggaatatttttatttaaatcctttttcctttgagcctatgggtctgttttttttttctttttttctgcagaataaaattatagtaattggtgatgtaaatgaattgaagactctttagttcttagtttgaaaaaaaaatccaacccagttctaggttttatgttaatcttgaatatttagggagaagagggaagtactagtgattcccttatttgaaaaccttcaaatatttacaacttctgggattatagaaatgtcatttaaaaatgaattaccaggcaaaaaagagttttagaattagattattttaaaggttacctctacagacaatggcaataatctccaatatacagccatcttacaaaaaatacattttacagataatatttccaaggacaggtgtaaataccaggaggtagaataagaaggttcttgttgtaaatgtttaagtaaaccaccaatttgtacagaagactgagcctttggttaagttctcagctttatacctaatcaggttgtattttctgatgcagcttaatgatgctgaatctctatgtaacttctgggaggaaggggtattttcctctatatgtttctgagaacctgttttgctcacattgttatttaggaagaatagcagactcaaggttgacctgtgaaatttgagttcacgttataagaaagcaggtctgagaaagacacattttactgtgagcaaaatagagtagccttaagtttctttggcataacaggataagggacagtaacattcttcattttcaataataatgatgaaaatgtggccaagcctggtggcttgcacctgtaatcccagcactttgggaggtcaaggcaggaggattccttgagctcaggagttcgagaccagcctggacaacacagtgagaccctttctttacaaacaattttaaagaagaatcattagtcgggcaaggtggcgtgcacctgtggttctagctactggggatggaggctgaggtaggaggatcacttgagcccaggaggttgaggctgcagtgagctgtgtttgtgtcactacactccagcctaggcaacagagcaagaccctgtctctgaaaaaaaaaaaaaaaaaaaaagacaacttataaacaattatcatataccattcagtattttgtatggatttcttacttactcttctatggtagacactgttctcacccgtcttactgatgaggaaacagaggtattgagaaatggataactatcaagctcaaattcacatcctaaagctctcacaccagaacttttatcttaatttcaatagaatatgcctcccacattatgttagttacaaaccggcctgcctaaggaattgatcatgcatgtctttcttcatcaattaatatgaaccaacaccatcataactaatgaggatatggtgggccataatttattaaaccttttgcttactattacgtagtttctcatttttggttaccagaaattatttttggttgagtacccttgtgtattcatcttg[136 bp omitted]ctgcctcagcctcctgagtagctgggactacaggtgcccgccaccaca[136 bp omitted]gcccttctttacctatttcttaaggatacatttctagaagtgaagttttgggtaaagaatttgccccaaatgcctgaccctgtgatacttgtacttagcgggtaatacagtgtttggaagacatagttgttaccttggagaccaaatatgccttggggtaagcataaggcagccagcagtcagcaacaaaggccagtaggcaatccaggggacctgctttaggaactcataggaaggcagttataagcaataccgttgaaccatgatcaagcatttggaggcaaatggaatttattctgtaaggtttatactttatagtttttattctactaatgttggttgcaaagtgagcctaataggatcaggtgattcagttatctggattcagttatctggagagtaccatgtctaagacaggttcagatacaaaataaatccatcagtcaagataagaaaagtagaatcaaaacctcattaatggaaggggaacaaaaaaataaataaaacctcccctcaaaaaatgaaaaaaaaggatgaaattcctcaacttaggccatgaatatattaatatcatttcattaatattattccattagtattattccattaatatatacatggcataacttggggaatttcatcctttttttttctaggcaagacataggcatatgtagaaattatacagttcatgtaatgtatggccatggttacaatgattgtgtggattacctaaacagaaaacattatgatcataatgaaaagataaatgttattaatatatatagatatataattttattttttattttttattttatttatttatttttttcgagatggagtcttgctctgtcacccaggctggagtgcagcagcgcgatctcggctcactgccagctctgcctcccgggttcacgccattctcctgcctcagcctcctgagtagctgggactacaggcgcctgcca[131 bp omitted]cacctcacctggcctgtttctttcttgagatgtataactttctaaacattttttcatctattgatgtgattgtcagtctttctgtattgatatatatgtattttataaatgtaatcataagtctcataacctcctttttctattgagtatatcttgattatttccctaagttagcatgtactcattgcatgatgttctgcgtcatgaatattctgatatatgcattagaaagtcagctttttgggttcctgatgaattccttatacagcctgtccagctcccatgttttgaccaacttccttcagtcctgagcccatgaaggacgttctagcttggaccatgacaggtattcctgagaggtaggaatggaaggaggatgatctgatttcctgggcaggactgaattgtcgaatcccaggtccagattcacatcctcagaaccagacactgccagaaacctccctgctgaagacctttggggtttaggtgaaagtttgaattccataaatggtgcgtggggtgtgtagcagaagcaggcatggagaagataagatcttctattagtgtaagtcaggatgggatcactgaggcacacctggtttaacgcttcgttttccctccccagttctggcttttctggattctgtgcttcaccaatagaggaatcccatggagcattaattagttcttgcaattccagaaccatgactgatgtaagttggtatttttctctccatgaaatactgtgatttttagggcgtgtgaatcttttcattaattttccttagacctatagaacttctccatagacccaagttttccacagagataaggactttggggttgcttggtctcaacctcagtttatgtgaagctgcatgtgttgggaggcgcttcagattagagagaggggagttaagtggttcttcccaggaatttcctaagagatgaagaccagtggtctttggagtcaccaaaggactccaccaccagtggattttgaaccagttgactttgaagtcattttgtcgtcaaccaggatgtgtaggccatgagtgacatttgtgtcatgtgcaatatcctatatcagtatcctcatgtgtcttgtatcagtactctctaactcagggacaagtgaagtactaagcgaggggtagttgatagtaacagataagatgatgcctaaggtctagatgataatatatttccacgatcaagaaaatctacagaaattttgttcagcctaaatgtacagatataattgagtgactaagctcatatattggaggataaaatgaattgcaacaaataaaaatactgtttattcatcataagaaaaaatgcttatgatgtaatctaacagtgatgtatttgagtcttgatagtccctaatttaatgggaatcatttttataaaataaagattttgtagtacatttggaaaaaagttttcatgttttcctatttctttctttctttttgagacagaatcttgctctgtcacccaggctggagtgcagtggcacaatctcggctcactgcaacttctccctcccaggttcaagcgattctcctgccttagcctcccaagtagctgggattacaggcatctgccaccacacctggctaatttttgtattgttagtagagatggggtttcacatgttggccaggctggtctcgaactcctgacctcaagtgatttgcctgcctcagcctcccaaagtgcttgggattacgggcatgaaccattgcacctggccttgtttttatttcttaaaggggaaagatggtgagcaattcacttttacaaagaatttatgaggaaggcacatagcacattgtaaatctgcatgatgtatacgcaggcactttttatataacagagaagaaactgagatttttaaaatatattaccagacagatctggatagctgagttatctcacagtatccgggaagttttttctgctataacaagattctcgtagaacatgttgacatcctgctttagtcacagattttcttgctttttcctacctatatcagaggctttcagcctactcgattgttatatttctccccctctttgtagttcatcctttgtaccctcttttttcctcttggaaatgttttctttaatttcacaagtaatacatgggtttttggttttaggggttggtgacattcagggatgtggccatcgacttctctcaggaggagtgggaatgcctggaccctgctcagagggacttgtacgtggatgtaatgttggagaactatagtaacttggtgtcactgggtaaggtcatctgcctgaaataatttagagtctcctctttgcatcatcagttttctgcactggaaattacagggctatctttgaagaaaccaggtgaatttcttctcccccttcccaagggcatgcttttatacttgctgggttagaaatgggtttgttaaacacgttgatcttccccatccctcagtgagctttacaccattctcgggccctccctgcaatcacctctctcctttaatggccaaggggctggatttgcattatagaacatttatttcataactatggcaaagaaaccagatttcataaattctgcaaatattatattgaatatctactcctggccagccttgtgctgagcactgtcaattgaatcatgaacaagctttgataacttgcccattttcgtgcagtttactttgtagtaaagcagaaacatcaaataagtaaatttataaatagataaatagtatgtaatgaagcaaattctttggaaaaggtaaacagcataagggaatagaaaatgatgaggactgacagggctaatttaggtaagacagtcggggaacgctttcttgaacagagatgtggagcctgggatctctatgtgaatatctggcggaggaacagatcagtcacagtgaacagcaaatgcaaagaccctgttgttggaaaggaactttaccagaactctagagtagagttattaaaggaacatgtactaagaaattaggccagggagataggaaggggccagataatacattgttttgttgttcttgtttgtggaatttggattgtttagtctctttcagtctgaaacagttcacatgtctttccttgacttgcgtatatgtctgtgatgcttttgaagattacaggccagctattttgtatagtgttcctgaatgtgggtttgtctgctatttcttcatgattagatttagaatatggatctttggcaggattatcacagaattgatgctgcgttcttctccctgcattttgttgggtggtatgattaatttatcattactcatgttattcactctgagtacttgattaaggtagcgtctgctggcttcctccttgtgcagttgccctttttcccttccacaactattttgtggggaggaactttgaaactattaaatattgtggaactgggcacagtggtggctcacacctgtaatcccagcactttgggaagctgagacggttggatcacttgaggccaggagttcgagaccagcatgggcagcatggcaaaaccccatctctacaaaaaatacaaaaatatttgctgggctgtggtggtgcgctcctttagtcccagcaactggggaggctgaggtggctggattgcttgaacctaagaggttgaggctgcagtgagctgagattgtgtcaccacactccagcctgggtgacacacaagaccctacctcaataaataaataaatattgtgttcctctttaaactttccatttattcatatgttcgctttctagtcaatgggctatattctgttttttttctgttatttattttgaagctcaaagtgttggagcttgtccagatttagtcagtgggaatcctttcatgatatggctttttggcacatctccgtcactctttgagtacctcctggttttctgataaacaaggtgttagaggttcatcttgtatgaaatttcccttgtctagttttacaatcagctattgctttgaagtgcctggttactttcacacagatttatagttattattttatgcatttgtcttttaaatcaataaatcaaaagtacaataatactaacttttatatttactcatgtagttacctttaccaatgttctttatttctccttatggcttctaattactgtttagtgtcctttcactttagtctgaaacactcttgtctaacatttcttctagagtaggtctactggtaatcacctccttcagcttttgttttttctggaaatgccttaatttcacctttattcttaaaggacagtttttgctggtatagaattcttggttgacagttttttttttcttttggacttttcaatataccatcctgttactttctgttctctgtggtttctgatgagaaattagctgttaatcttgttgcagattcttgtatgtggtaggctgctgctttcttcctgtgttctgaagtctttttgtctttgggtttccataatttgacaataatgtgtctagatatgaatctctttatcatgtctgaagttgttgagcctcttggatgtgtgtattcctgccttttgtcagattttggaagttttcagacattttttcttcaaatttttttctctacttttgtctctcttctttttctgggactcatatgatgtgtatgttggtgtgcttgatggtatcccattgatccctcaggctctcttcactgttcattattcctttttctttttgcttctctagtgcaataatttcaaatgactcattttcaagtttgctgagtctttcttctgctgaatccactattgaaattttcatttcagttactttactccagaatttgtttggttccttttttttataatttctatccttttattgatattttcattttgttcatacattcttttcctgatttcctttagctcttggtccatggtttctgtagctcattgagcatatttggatagttcatttaatgtctgggcttcctcaggaatggtttctgtcagattcttttttttcctttgaacgggccccatattttcctgtttcactgtatgctttgtaattttttttgttaaaactgggcattttgagtattataatgtggtacctctggagattcaattttcccattcctcaggcatagctgatttctgcttgttgagggctggagctgtcagattttttcaaactctttttgcaaattgtatattccttattgtatgtggtcactgaaatttctgttccatcatctctacagtcagttagtaccagacaaagatttacttaaatatctggctgtaaaaaggggaggaaaaaaaggtccattagccctttaaatcttccaatagatacttctggggaaagctgctgtggctgatggggctaaaatcaaggcagttatctgtgctggtccctcaaggtaacacaaaacccaccaaactgcacaaccctgaattttttggaagacaaggtcacgctgcccacccaggtcccaaccggctgttccaggaatacaggctgctctccccacagctgtggtggagctgaggagtgaaggaagtgattagttggtacacagcattccaggcacataggcctgtcatcccatagcattggctggactgagaaatgggggatggtggcttgcacgagccactctttcacctaagaatagtagcctctttattcatccagcactccccttgttgttatggaagtgcctgataagattccagaattaagagtttgtggatgccaatctctctctctcttttttttttttgagatggagtcttgctctgtcacccaggctggagtgcagtggtgtgatctcggctcactgcaagctctgcctcccaggttcacaccattctcctgcctcagcctcctgagtagctgggactacaggcgcctgccaccacgcccggctaattttttttctccttttttttttttattttttagtagagatgaggtttcaccgtgttagccaggatggtctcaatctcctgacctcgtgatccacccacctcggcctcccaaaatgctaggattacaggtgtggcccaccgcacctggccaatgacaatctgtctttccagctcaattgttgctttgatggaggtaccagcccttagagcttcctatttcatcattttgtgtgacatcactcctacatattcatttaatgtcactattgatatggttagatttcagtttactatcttgctattttttgtttcactagttctttcttttgtttccaccttcttggattcatcaagtattttttagtattccattttatctcatctgttatcttttgctgtattatttgtatttacttttgggattacaatatgcatccttaatttagcatggtctacttgaaattaataacatactactttgttgtataatgtaagaattttactaatctgtaaacttcattcagcctgaaaagcttcctttagcatttcttgtgttatatggctactagcagctaattttatcttttttttttttttttttgagacagtctcactgtgtcacccaggctggagtgcagtgccatgatttcagctcaccgcagcctctgcctcccaggttcaagcaattctcgtgcctcagcctccaaaatagctgggattacagtcgtgtgccactatgcctgactagtttttgtatttttagtagacacaaggtttcactgtgttggccaggctggttttgatttcctgacctcaggtgatccacctgccttggcctcccaaagtgctgggattacaggcatgagccactgcacccagccttcatctttcttatttttgaaggatatttttaccagatatgaatttcccaactgatatattttttcttttagttagcttcaaaaatgttccattatcttctgaactctattgtatataatgattagacagctatgattcttattgttcattttatatatactttattctctgttattaagttttttctttatttttggtctgtaataatctgactataaagttctagatatggttcctttacatttatcatgcttcactttcccttacctttgatcagtgggttgatttttttattgaatttggagaaatttcaaccattgtatcttcaaatacttttttctgcttctttagtacttttcctcctcctaagactccaattatatgtgtgttagaccacttatatggtgccaccagtcacggaggtgcaacccccagtctttttactctttgtacttcagtttggtaatacctatttacctgtcttgaagtcactgttttttttttctttgatagtgtccaattattgttaagcctatccaataaagatttcattccacctacattttatagttatagaatttacatttggttttgtgggtctgcttttattgactgtattttctctaaatcttgtgtcaaattttcctgcttctttaccggtcttacaatttctcattgtatactggccattgtagatgccatgttgtagtgacttggggattttattatcttcctaatagttaaactgttcaggcaagcagttaaattaatagcagatcacaatgatctttttaagagttgatttttgaaggcaggtacagtttggttttatccttagtcctggacataattcttactctaggtagggcagtggttctcaaactgtggactgaagacccctgggagttcccaagaacctttcagtgggccaaacctttcacaaagtgaaaaatattctcataacaatactgagaggtttgcctttttcactgtggtgacacttccactggtggtgtagaagccatggtgaatcttctctgctttagcatgagcaaaggcagaggcaccaaatagtactagtaatcatcatattctttacctccacacacaaagaaaatgtgttaagaaaaaacccattttcacttaagaacatcttgaagaagcagtattcattttattaaatctcaacccttgattatatatacatttaaaaaatattctatgtaatgaaatgggaagtatccattaaggtcttctgctgtataccaaagtatgatggttgccttgaagaaaaccacttgtacagttgtttaagttgtgagttaaaggccaggctctgtggctgatgcccgtaatcccagcattttgggaggccaaggcggacagatcacaaggttaagagatcgagaccatcctggccaacatggtgaaaccccatctctactaaaaatacaaaaattagctgagcatggtggcacgcgcctgtagtcccagctactcgggaggctgaggcaggagaatcgcttgaacccgagaggcggaggttgcagtgagccaagatcgtgccactgcattccagcctggtgacaaagtgagactacgtccccacccccaaaaaaattgtgagttaaaccaactgcttttttgacaaaacaccatatttttcaccaaagaatgaaaaactttgtttgttcagacttgggcagtaggaaaacattttcttgcaagtgagcctgtcacttcaaaaataactaatatttgttgccaatgatataattcaatctgtcatgttaaaattagaattttgtaaaatgtttattcataattttgagctttatagcttcctaatacattaagattttttatgagatgggtggtaatattaacatgtgattttttgatgttgtatagtgaactacgtcaacatttcaaagatctgcataactctttgaatcagtattttccaaatgaccagtgtatgatgttacaaaattacacatggataaaagattattcaaagtgcaatgtaacatagtatgaaaagttcacagatatgattttatattccacattgtacttaacctgccagacactaccatttcttaagttttagggtggtgtcaaagaaaaatatccacagttatctgcatggactagtaaaatattctgccattttccaactatgtaccatgagaggctagattttcttcatatacttcatatatatgattttcttcatatatttcaacctaaataacatattgccatagattgaatgcagaagcagatatgagaatccaggtgtcttttattaaaccatccatttaaaagatttgaaaaaatttaaaacatcttttgttttgttttagaaaagattatttttataacaaatcatttatgttaacagttaatggtttattgttattttaagtgaattagtaaatatcttaaaatttctctgtttaaatttttaacatgacaaatatcaaaatatataactacataaactaaaagtcttttgggtcctcaatgatttttcttgacatttaagaagttaaacccatatttatttactgacactgtaaaaccttacataaaacataagtagtaagtaactaaaatgttaaatctaaatctataatgttaaattaaaatctaagccttacatagaaattaaaattcgctaaactactgatgctatgttgtacaaaactgtactccttttagttcataattggtcacctccatattcagttggaatattaggttggtcagcttaaatactgtggctttgttttggttatccacagaatctttacacccaaatgttaatgcataaaaagcagcaagacattgttaaatgaaacagcaatagtgcagtttagacctgtgaccaactatatatgattaaacttacttcccacattcacatcacaataatcatccatcatttaatagctcaaccaaaatgttatacagtcatcaacaggcaaggcacatgaaaaccccgcacaaccaagaatgatttgggcccaaatgtcagtagatttgagtttggaaaaaccttcttgtagttgttaaggctcaatggctctggttaatttaatataataaacaacaacttcataatggaaaaaaattaaatcctctattgaggtataaaacctaattaatttataaggataaagtaagtgactaccttgaagtcaaaacacattatggacaatgaaagagtattacgattgttccaaattgacaagggtatttaaacctaggtacacaatctttcttaaaattaatttatagaaagtcataacctgtgggtacatgaatatgaatatacatcttctccaacttgacaagtacattattgctgggacaggtaccttttaataacaagtaacttattagcctagaaaggccaaacttctctttttattgtcagcttttggtttttaatatacctggggttatataaacaaaaacacagtcatagtagttttgggctaagtaaattctggattatgtcaaagaaacctgattgtttctagtatcttttgtaagcgaaagagcaaatctttgtgcttgctcagtggccttttaggaaacctgaaaggcagattttatgtgaaagacataatctgttacaatctgtttcattattctgaattggaaaaggcattaacaaaaagagttgtcagaggagcttttgacaagaacaatagttgtgactaattaatcagaacatcaacacaatatttaaaataatgagaaggtagcaagattttaatttttatttaaataaaaaattctgttctatttaaaaatagtttagatgtgtagtataaggtagctaaaagcatgaaaattatttgactcttaaaatttgaagcatacacagaagtgtggcaaaattatgcagatttattttcttcatgtattgaagaaaaagaataatactttaatttcctcatatagagtggacagtttactccaagatcatcattttcccttagctagcagtcttttctatcatatcatacttatgtcacttttttcatacattatatgacatagcatttcccatatgcatttaaacctgctaatattgtcaatataccatgctgaatgacactataatttaaagctttattttcaattttaaaatataattaacagtattaatgtgttataagatgatgtgtgtatcacattgatttttgacagggtagtttgagcttagttgagtgaaaatatgtttaacaatggtcaagaaataagtaaacttaattgaaaaataactcaaaatatttgttcttcctcttttatgaatatcttcttaggaactttttatgcaaccagaaattatttattagtaactctcaagatcattttgtctaagtgaattggagatcttataatttaaagtgatccttaaatagcaatacaattactgttgatttttaaaattgatagacatttaaaatttttaaataaggtaaaatctatagagtcacataattgcagcattatatgaagttataaaaatcaatccttttataaaaattctggctaataaatctaagtaaatgtaaaatttaattgaactttatatttttacaattgtgaacatttatgaaagcaatgtttgctttatctcaggggttggaaaactctggctctggaggccaaatccacctgtttttgcaaataaagttgtattggaacatagtcttgcccatttgtttatatgtttacatattgcccatggctgccttgataaaatggcagagttgcgaccattgagttgttagacaaaagagttgttagacaaaacaaaatcagccaaagctcattatgataagaatttgattcccattaagatacattggatgaccacaactgggcacataagggcttgattgatggaagctgacatttggtttgagggaacatcagcgtgggaaaatgagggacttgttgaagcgacctctgtggaatcctccagaaaactataaaatcagaacattcagatcacaagagctgcaaaatcaaggctgagtttgttatttaacaagggagtgccttaatgccaaggagtgagttcagtaagtctcctaatttgtcttttatttctactgtagtttttttttttttttccctagtgaaggaaataaaatgtgtggttttcttgttttctttcagatttggagtcaaaaacgtatgagaccaaaaaaatattttcagaaaatgatatttttgaaataaatttttcccagtgggagatgaaggacaaaagtaaaacccttggccttgaggcatccatcttcagaaataattggaagtgcaaaagcatattcgagggactaaaaggacatcaagagggatacttcagtcaaatgataatcagctatgaaaaaataccttcttacagaaaaagtaaatctcttactccacatcaaagaattcataatacagagaaatcctatgtttgtaaggaatgtgggaaggcttgcagtcatggctcaaaacttgttcaacatgagagaactcatacagctgaaaaacactttgaatgtaaagaatgtgggaagaattatttaagtgcctatcaactcaatgtgcatcagagatttcatactggtgagaaaccctatgagtgtaaggaatgtgggaagacctttagctggggatcaagccttgttaaacatgagagaattcacactggtgagaaaccctatgaatgtaaagaatgtgggaaggcctttagtcgtggctatcaccttacccaacatcagaaaattcatactggtgtgaaatcttataaatgtaaggaatgtgggaaggcctttttttggggctcaagccttgctaaacatgagataattcatacaggtgagaaaccttataaatgtaaagaatgtgggaaggccttcagtcgtggctatcagcttactcagcatcagaaaatccatactggtaagaaaccttatgaatgtaaaatatgtggaaaggctttttgttggggctatcaacttactcgacatcagatatttcatactggtgagaaaccctatgaatgcaaggaatgtgggaaggcttttaattgcggatcaagtcttattcaacatgaaagaattcatactggtgagaaaccttatgaatgtaaagaatgtggaaaggcctttagtcgtggctatcacctttctcaacatcagaaaatccatactggtgagaaaccttttgaatgtaaggaatgtgggaaggcctttagttggggttcaagccttgttaaacatgagagagttcatactggtgagaaatcccatgaatgtaaagaatgcggaaagaccttttgtagtgggtatcaacttactcgacatcaggtatttcacactggtgagaaaccctatgaatgtaaggaatgtgggaaggcttttaattgtggatcaagccttgttcaacatgaaagaatccatacaggggagaaaccctatgaatgtaaagaatgtgggaaggcttttagtcgtggctatcaccttactcaacatcagaaaattcataccggtgagaaacctttcaaatgtaaggaatgtgggaaggccttcagttggggttcaagcctagttaagcatgagagagtccatactaatgagaagtcttatgaatgtaaagactgtgggaaggcctttggtagtggctatcaacttagtgttcatcagagatttcatactggtgagaagctttatcaacgtaaggaattcgggaagacctttacttgtggctcaaaacttgttcatgagagaactcatagtaatgataaaccctacaaatataacgaatgtggggaagcctttctgtggacaacttactcaaatgagaaaattgatactgatgaaaccttatgattgaaagttgtaaaagaatattttgtgtgtgtgtatagacaacttatcataataagaactcttactcttgagaaaccttgtgaatgtaagggttgtgcaaaagccattcatttctgtttatgggcaattatcttgctatccagcaattcatactagtgagaaatattttgaatataattaatatgaaaaggcctttagacttctgtacagtcttattggatatcaatttatactgatgtaaaatcatttaaatgtaaggaatgtgtgaagatcttcattcatgacataaggtctgattaacatcaaataattggtatttgttaaaaagagtttaaataggaggaatgtgggaaggacctaaacttaattcagttcttgctgcacatcagagaattcatactgctgtgtaatcctatgcacataaggaatttgggaaggcttatagacacagtaaatatcttagagtacatcagagaattcatccaaatgagaaatcatttgaattagaattataggaaggcctttagacaaatgctacccaaattattatccagagactggtgcagtcataaaattgtcatctgtcaattgtgagataaacgtggaaagtgagtaaatatttggaacttttatagcaatttgacatttccataacattctgttttacaaaattatcagtccataaatgattgagaattgaaaacaaagtttgttctttcccagaaataatttgagacaagactcacacttttcaagacatgagacaagtgacaatttaaataagaaattcttcacttgcacctctctgattagaatagcagaatattcatactatagcaagatttggcaaatgagggaatcaaaattttctaatgcctgtaacagcataagataatttataccagatatgttaaatgtgcagaagccttccaacactattcagtctttgttaaacttcagtaagttcatcctagagagtaactctgttaatgtaacaaatgtaggaaaacccttatccatggcaaataccatactgtcatcaccatttcacctccatactacctgtaggatggtgagcaaaatgcttatctcttctggacatgatgtttcaaatgctgatggtaactaataatgctgttacagagattagatggatttagtatgcatcatatccttggaagagtatctggtatgtagcctatgcttaatacatattagctattgttcatattgtctttattattagtattactactggtgaattcttaggagaggcacaaccgttttgaggaatgaattcagaaaagcttcccataaccactcatccatttgaatttcagatagttcattctggataagatctagtacagtataaagaatttgaggggattttaattcagagtttatcccttaagctgagctaaaaaaatgagacttgaaaaaatccagacttttgaagagtttaggaaagctgttttatagaatgtcacacattagtttcattcctcatggtgaaatttgatatgggcctctccttcacatttctcgtaacatgaagttggaaatagaggcttaaacattttttaccagaacacttcatagatggtgatgtgtacttcatcttgcaatacctcagaagcagatagtatccatttcccccagtatcaccagtgccaagtttgatcacttatggtaactactggagttgtctgttataaagatccattatatacctaataggattggtcagccttgatcaatgatctttggaaatgtgtgatcatatggtatgtattttacttttttttttttttgggacaggatctctctttctgtcaccaaggctggagtgcagtggtgtgatttcggctcactgcaacctgcacctctcgggttcaagtgattctcgtgcctcagcctcccaagtagctggatacacaggtgtgcaccaccatactggctaattcttgtatttttagtagagatggggttttgccatgttggtccaggctgatcttgaactcctgcacctgcctcagcctcccaaagtgttgggattacaggtgtgagacactgcgcctggctatattttactatttggaaatcacaatgcatcttaaaattgatggcttcttgcaaccactttcaaccaggtgcctgtcatgatttagtgctagcatcaaggcaggttagttatgaagaaatagagtgtgtgtttatatactcacacagttagaaatcgacccttttaaaaattatttctttttgaaaataatgtcagttccatcagaactaatgcattgataactaaatgtctgtggttccttgtcataggtctacacctgacctctctattttgtgcacataggggattcgtaatatcactgttcagtcagtcattcaccatctagtgatcatcattctacatgattgcactttttcaaaggcataaaaagccaacagttgcactcttaataatcaactgtaacacaaagcagagtactttgggagttttaacaggatatattattggtaactggctattatgccactccctctgggtgccacatttgcctgttaaccaagaaatgtagacatggtgccttatcccaacatttctgaaattatatctcaaggaatcaccagtgcttactagtacttgacaatgaaggaggattttacagttaaagaagcttataaagtagcatctactaaatcccctcctaaggaacaagcaaaagcacctcaccagcttatcaaaagactaaagagaagtgaaaaaaaaaaaaagacggccgggcgcggtggctcatgcctgtaatcccagaactttgggaagccgaggcgggcggatcacgaggtcaggagatcaagaccatcctggctaacacggtgaaaccccgtctctactaaaaatagaaaaaattagccgggcgtgg[180 bp omitted]aaaatggttgaactttgtttaaactggtgtatggcaaacttcactgttgaaatacttattcccatgacctattatctttgtaggtgggtgaaattgcattgggaactgctgctataaccaaaagagaatttcagtcaccatgtctggttgttagctatgatggaatggcagcatcatggtctcagttatgagtgaaaatctttgttgtagctaagtagtggtgcctcctgagttttattaaatgccgtttcactatctttttctgcacttctatagtatttaatttgttcatgtgataatttattctgatagattcactgactttttcccattcctggatattccaggttagtcatagtatccttctgatgcattgcttgatttcattttgccattttatttagtatttttgcatctcatgagtgagattatataatagttttcttttttattgtatttttgtttgttttggtattgcaatagcctgttttttaatattgtatgatcctattaggttattttgtttgatccttgaccacttttctagttccatctgttgcatttttttttgtcttttaattcctacttcagacataacagatttattgagtgttagcacagttcctttaaggagccttcatagccatgtagtactagccaagatccgcataaaagacgcatcccagcatggcccctaaaatccttcattatgtgctcttaagaataatgtgttgggaagtcagaacttccttatagggctgttatgatcatacttgtacatgtcttttggagcacacgtgtacacatttctttctgtatatactgggagtggaattgctggggtgtggtcatggatacacatctgttcaactttttagtaagtttaaattcttctgaacagttttccaaacaaatgaaccgtcttatactctcaccagcagtatatcaatgttctgctttctccacatctttgaaaatacttgacatcatcagtttaaagaatattttcattactctcataggtaatatagtggcatttgattgttgataattgtggtttaattttccattttctgattgctgcctatttgtatattcttgcaatttctcttcgctccttgctccgggcattggatgcattcgatgtgtctgttttttacagagcctctgttcagtttgcaggacaacaattaacacctaggccatgacattctctctgtgtgtgtgtgtgtgtgtgtgtgtgtgtgtgtgtgtgtgtgtgtattccccaccagtgagctggttttgatgactgtgatggaatcagctttatctctgcatctccagttcccagtatgaaccatgacccttagttgtttgat[131 bp omitted]ggctaacacagtgaaaccccgtctctactaaaaattaaaaaaaaaataaataaataaataaaacccaaaaacattagccaggcgtggtggcgtgcgcctttagtcacagctactcgggaggctgaggcaggagaatggcgtgaacccaggaggcggagcttgcagtgagccaagaacgtgccactgcactccagcctggtgacagagcgagactccatctcaaaaaaaaaaaataccacattggctagaacaatgaggaagtatattgaatgatataacatgctttcagagggacagtgggctccagatatttttgattcatcagcaaaattaaatttctttttttttttttctttttctttttgagacagagtctcgctctttcacccaggccggactgcagtggcactatctcggctcactgcaagctccacctcctgggttcacgccattctcctgcctc[222 bp omitted]ttccactctgcactccccagtgttggctggcaccatgatggctggcaggtttccagatattacaaacagacatgacaacatccacagaaaataataagggagagcatctcccgtgacaggagcaaggaaacatttcccattggccagcagcgtacatctgcttttagttgctaaaatgggttatatgtaattcctgaaataatcattggtattactttaaattagccatagactctcaaaggttttagttaaataaaaaatcagactcttaagtttcattagctttttatgtatgagacataacaagtgatcctttattttaaaaagtaaaattacaaatatgtataaatttcataatacagataatttaatgtatatattaagaccacaaacataatttcacctttttgagattaatgttaatttttaaaagcagaaattctgaaatataaagtctatattgttagaacatttactaggaattttttatgatatagaatattatctgattgtttgtagatgtaggggacagggaaaatatttttggtctaaccttgttaagtattttttcttccagactcagaggagcctactcttaatttctagaattctgttagttaacctgaagactgagaaggccaagatttacaatgtggaaatgaaaccaaggtgtaattggaatttgggtgaacatatttactcaattcattttttaaaatttgagacagagtctctctctgtcacccaggctggagtacagtggtgtgatctcactgcaacctctgcctcccgggttcaagcgattctcctgcctcagcctcccgagtagctgggactacaggcgtgtaccaccgtgcccagctaatttttgtatttttagtagagacagggtttcgccacgtaggccaggctggtcttgaacacctggcctcaagtgatctgcctgcctccacctcccaaagtgctgggattacaggtgtgagccactgtacctggcctcagttcatttttacagcacacatacatagcactaaattcaaaagaaataaaaatcttatctctcaccttttctgaagctttaaaatcacccttttcagagacaactacactttccagcctcttctgtgttcttgagcagatagtccatgtaaatagcagagtacattgccttagagtagacattcaagatttgaaagtattcctttactatctcataattcagtgttagtcatataccagtgtcattatggatttcatcaataaaaattttggttcaatttattttcactatacccaagtgtttactgtggaggaagggtctgcagtgtccttggccacatttaaaaaatatggttcattccggactgtttgcccagatctctgcctggtgcacaagagatattgtggcctctaccaccatcaccactgggattctcttcacctctctcctctactgaatttcttgttttctactcattcattctggtggaaaaccccttccacttgctttctttgaagaggtgacttggaaataattcacgtggttgaaaggattttattctacccttctgtttttggtgtctccctattcttggccagcaggttcctaggcatgttcttttcatagtagatggcagaaacacaagaggctgagccaaagcatatttaaagtatctatatccattgtaatccacccaaattctgttgactagacacatggccaagcccaacaccaatggggcagggatgagctctgccaagggtggagagtaagggaagaattgtgggcaaatattctaagccaccagattcataccaacattactggcatgactgtgagtcaacacattccactgtggggggcaactgagcaataattaatgatgtcattgagaatagtttattcttcacaggcttcttgtaattcaggtctctgcccaaatgccacctgattgaacaggtctttcttgaccacccacttgactagccccacccttctgtcagtcacactctttcagattatttttaaaaatttcctcatttcaccaaacactaagtgacattctttgattttatttatgtatttatttattttattttttgagagggagtcttgctctgtcacccgtgtcggagtgtagtggcatgatcttggctcactgcaacctctgtttcccgagttcaagcaattttcctgcctcagcctcctgagtagctgagattacaagcatgtgccaccacgtccagctaatgtttgtatttttagtagaaatggggtttcactatgttgctcaggctggtctcgaactcctgacctcaagtgatcacctacctcagcctcccaaagtactgggattacaggcgtgagccaccacgcccggccaggcattctttgattttaaataatgtgtcaaagaaagtgacattatttgtccccatgttgattgtctacactcttggacataagttccacaggatcaggggatatgcttctcttgctatcattgtatctccaatatctagagaaatgtatggctcagagaagatgctcaaatatttgttgaaggaataaaagtgaaaatggattgattcatatttagactctaaatagaggtggagtactgctgcctcctttagagaataaaactcaaggctctgaatagtatgagtttctcatatttagggaaggaaaatatgtgaggactaaagtagagttaaatgcactgaggaagctaatatttataaggatgcaatttggaataatatgacttcctggatttaattgacttctggtaatttgaatgtagtgtgaaggaatcaacccttattctttgattctggaactcacaccacacaaaataatgcagaggttgagggcattgtctcagagactaaacctccaccacttactagtagtttacttaatgtcttaatctcaagtcacttaatctttagtatctgtaatagagatataacaatagcataaccatgtcgtagcactgtggagggtattatatgagtgaaaacatgcagcatggttaaggcactgcctgtaagttctgtataagggattcccacagacctccagatctggcttgccaagactataagtggcatccaaaaggcatgggcaaaagccctgagtccataccttttctgaattcttatattagttctaataatttatctgatgattttttggtgttttcttggcttactatcatattatctaaaatgttaattttatcgtgttctttttatgtattttctttctctggctttatttatatatttttttgaatagggtctttctctattgcccaggctggagtgcaggggtatgatcatagctcactgcagcctgaaactcctgggttcctttggtccttccacctcagcctcctgagtagctgggactgcaggcacaggccaccatggctggctggtttttaaactttttgtagagacagggtctccctatgttgcctggactagtctcaaactcctaggttcaagtgatcctcctgcctcagcctcccaaagtgttgggattacacgcatgagctgctatgcctggccctctttttcttgctttaaagcaggggtccccaacccccgggccacagactcatactggtctgttaggaactgggccacacagcaggaggtgagcagtaggagagcgagcaaagttcatttgtatttacagccactcctcatcactcacattactgactaaggtcccccttctgtcagatcagtggaggcattagattgccatagtagcatgaaccctattgtgaactgtgcatgcaagagttctaggttgtgcattccttatgagaatctaatgcctgatgatctgtcagtgtctcccatcacccccagatgggactgcctatttgcaggaaatcaagctcagggctcccactgattctacaaaataatgagttgtataataatttaattatatattctaatgtaacaataatagaaataaagtgcacaataaatgtaatgtgcttgagtccaagcagataagtctttccctataaaacctactccaaaatattggaagatgtgagtttcactagatgactagaaatcaacatagggaaacatcaaacatgaaaatgcaagaaaacgtaacacctccaaagaaacacaataattctttaataatagaccccaatcataaggaaatatatgaaatgccagaacaaaagttcaaaataatgattataagaaaattcaacaaggtacaagagaacacggatagataattcaacaaaatcagggcaacaatttacgatttgaatgagaaattcaacaaagagagaaacatcataaaaaagaaccaaacaaaatttagagctgaagaattcaatgaataaaataaaaaatacagtcaagtgcttcaaaaacagactaggccaagcagaagaaagaatttctgaacttgaagacaggctgtttgaaataacataggcagacaaaaaaagaaaaaagaatgaaaaaaccttacaggatttgtggcacactattcagtgaacaaatattcacattatgggcattccagaaggagaaagttgagggaaacatatttaatgaaataatagctgatttattcatagatggcagaaattaaaagaaataatagctggaaacctataaacaccatcttgaaaacatgcaaaactataaaactcactggtagagccaatgcacaagaagagaaaggaatcaaaccttatcactgcagaataccacccaagcaaaaataataagagaagaagtaaggaacaaagaatatataaaacaaccagaaaataatcaataaaataacaggagtatgccctcacctattcataataaccttgcatgtaaacagattaaattccatatttaaaagatataaactggctaaatggattaaaaaaaaaaaaaacaagacctaactatatgctgcctataagaaactcacctcacctataaagacacaaataggctaaaagtgaagagatggaaaaaggtattccatgcaaatagaaaccaaaagtgagcaggaatagctatatgtatattagacaaaacaaattttaggtcaaaagctgtaagaacagacaaagaagaacattatataataataaagggataaattaaggaagaaaatataacaattgtaagtatatatgcacccaacactggaacactcagatttataaagccaatattattagatctaaagagagagataaagcgaaatacagtaatagtttgggacttccacactctactctctgcattggagagattatctagacagaaaattaacaaagaaatattggatttcaactgcaccatagatgaaatatacctaacatatttatggaacattctgcccaatgggtgcagaatacacacttttttcatcagcataataaatacctatgtcaaaaatagaaaatttccaataaacaacctaattatgcatctcaaggatctagaaaagaagaacaagcccaattagtaggagagaaataataaaaatcagagcaaaaataaaattgagagtcaaaaatacaatagagcaatgaaacaaataattgtttttttgaaacaataaaatcagcaattagccagactaaataagaaaagagagaagactcaaataaataaaattggaaatgaaaaatgagacattacaatggataccacagaaaaaaggatcattagacaatactatgaaaaatatatgccaatacaattttaaaactagaggaaatggataaattactggacatatgcaacctactaagattgaaccaagaagaaatagaaaacctgaaaagactaatgacagataatgagattaaatcagtaataaaatgactcccaataaaaaaaagtccaagaatggatggttttaattactgaattctaccaaatctttaaagaattaataccaatttttctgaaaatatttccaagaaattgaagcagagggaactcttcctaaatcattttatgagaccagcataaccctgataccaaagtcaaataagaatgcaacaaaagaaaactacaggccaatatccttgatgaacagaaatgcaaaaacctcagcaaaatactagcaaatagaatacaatacatcaaaaagacaatacactatgatcaagtgggatttattccaggaatgcaaaaatggctcaacatatgcaaatcaataaacatgatatatcacatcaacagaatgaaagacaaaaaccatatgatcacctcaatagatgcagaaaatgcaactgataaaattcaacattccttcatgataaaaactctcaataaattaggtatagaaggaaagttcctcaacacaataaagaccatatatgacaaacccaaagctgtcatcatactgaatgcagaaaagctgaatgattttcctctaagatctggaacaaaacaaggatgcccactctcagcactcttattcaacataatactggaagtcctagttagagctattaggcaagagaaaaatagcgggcatccaaactggaaggaaggaagttaaatagttcttgtttgcagactacataattttctatatagaaaaacctaaagactctaccaaaaaactcttagaacagataaacaaattcactaaagttgcaggatacaaagtcaacatgcaaaaatcagtatcatttctacacacgaaaaacaaactagctgaaaaagaactcaaaaaggcaatctcattttctaaagctgcaaaaacaacaacaacaacaaaaacctaggaagaagcttaaccaacgaggtaaaagatctctacaaggaaaactacaaaatgctgatgaaaaaaattgaagaggatacaagtaaatgtaaaaacaccttatgctcatggattggaagaattaatattgttaaaataaccatactgccaaaaggaatctacagattcaatgaaatccctatcaaaattcccatggcattcttcacaacaacagaaaaaaatctcacaatttgtatggaaccacaaaagacctcgaatagtcaaagcaatcttgagcaaaaagaacaaagctggaggcatcataccatgaaacttcaaaatacaaaacaaagctgcagtaacccaaacagcatggtgctggcataaaaacacacatagaccaatggaacagaatagagaacccagaaattaatccatatatacacagtcaactgatttttgtcaaaggtatgaagaacactcattggagaaaggacattctctttaataaatgttgctgggaaaacggaataaccatatgcaaaagaatgaaactagatacccatctttcatgctatacaaaaataaactcaaaatggatcaaataccaaatgtaagaccccaaaccacaaaactactagaagaaaacataggggaaatgtttcaggacactggtctgggaaaaattttaatgaattttttttttttttaagtaagaccacaggcaacaaaagcaaaaataaacgaatgaaattatatcaaactaaaaaggcttctgcacagcagaggaaacaatcatcagagtgaaaagacaacctagagaattggggaaaatgtttgcaaactatttatctaacaggggattaatatccagaatatacatttcaacagcaaaaaaatttttggttaaaaaaatgggcaaattttttgaacaggcatttctcaaaagaagacacagaaatggatgacaaatatatgaaaaattcccagccttatcatcaggtaaatgcaaatcaaaaccaaaatgaagtgtcatctcatcccacttaggatggttattatcaaaatgacaaaaaaattagcaagtgctggcaaaactgtggagaaaagggaactcttatatactgttgatgggaatgtaaacttgtatggccactgtggagaacagtatgaaggctcctcaaaaaaacctacgaatagaagtaatcatatggtccagcaatcccacccagacatttatcaaaggacaggatatccgtatatccaagagacatctacatccccatatttattgcagcactatgtataatagctaagacatgaaatcaacctgggtgtccaacaacaaatgaatggataaagaaaatgtggtatatatacacagtggagtactaagccataaaaagaatgaaatcctgtcattcacagtaacatggatggaagtgtaggacattatgttaagtgaaataagccaagaacagaaagttaactgccacatgttctcattcatatgtggaaaccaaaaaagttgatctcacagaagtaaaaagtagaacagaggatactataggttgagaaggggagaatatgaacagatttgttgaaggatgaaaaaatcacagctagataggaaaaataaattctagtattctatactactgtgggatgcctatagttaacagtaatatatagtttcaaatagttagaaggaggatattgaatattcccaatacaaagaaatgaaatatatgaaatgatggctatgctaattactctgatctaatcactatgcattttatatgtatgtgtgtgtatatatatacataaacatcactatgtaccacataaatatgtacatttgtcaatttttaagtttctataagtaaaataataggtttttaaccccataaagtatttcataacaatttaattttaattgtaatcatccaaatgaatagatgcttaggtgctaattaggaaaaaattgctagaaataattttttgaagtattatatatctttagaagtatttctctacttctggaggtggagggggaagagagacatatcactaagtcagagcaagggtattgggaataccttgctctgtgtatcaagaattatctgtatactgcataaataataattcttgaatgtatgtaacaatctttaggtatatagatgctgttttaacaaatgacaaaatttttaaaaagttaaaatatattaaatctcacacacacaaacacttacagaccatacatggcaccgtttgcagttggagaaatgtaattaattgtaaagatgcagtattaaattataactgcataaaattaaccgtagaacatactgttctattataataatatcatagccacctccagttgttattgcagtggatgcaagtgttgcaagtattcacttaaaacactatgtgatactagtcatttctgtgggagcagtttatctctccagtaaattgcatattgcagtaaaaagtgatctcttgcagttctcatatatttttcatcatgtgcagtgcaatactgtaaacgatgaataacagcatggtgcccatacaaagcactgcttgtgatattcgaagtgctcccaggaagccgtgaaaagttattacattacaagaaaaagttgaattgcttgtcacgtaccatagactgaggtctgtggctgcagttgcctgccatttcagacagatgattcatcttataaacagattatgtaaatatgttattgataaatacagtatggtactgtaaatgtattttctctttatgattttctttaaaatatttttctttctcggccagcactttgggaggccgaggcaggcagatcacctgaggtcaggagttcaagaccagcctggctaacatggcaaaaccccgtctctactaaaaatacaaaaaattagctgggcgtggtggtgtctgcctgtagtcccagctactagggaggctgaggcacaaaaatcgcttaaactccagaggcagaggtttcagtgagctgagatcacgccattgcactccagcctgggtgacagagcgagactctttctcaaaaaaaatttttttttctttctctagcttcattttacgaatacagtgtgtaatacatatagcatacaaaattgtgttaattgactgtttatgttattggtaatgctcaatagtaggttattagtagaagttactaattggtggagtcaaaagttacctctcgatttctgactgtacagggggttggcactcctaacctctggactttcaagggtcaactgtagttgttatactgtatttttaaaattttgcattttttattgtcttattgctatttttttggtcctcagttggttgaatctgcagatgcacaatccacaaatacagagggcagactgtatttgctttgctagtatttacttttggttaatgtgcatgtgtgatttatgaatgatggcaatagctatgcagtggcagaaagttgggagtttatgccccataatgtgtttttgaaggcagaatactgctaggtgaaattgaacaaaacctaaatatatagagaaatataccatgttcatggattgaaatactccacattgttaagatgtttattcttcccaaattgatatgaagattcaatgcaatcctaacaaaaatcccagcaaacattttgtaaatctttccaagctaattctaaaatgcacatagaaataaaaaggtctagaattgccaagagcagtcttgaagaggaaaaactttggtttcaaagaacatctttatttctgccttcatttcgttatgtacccagtagtcattcaggagcaggttgttcagtttccatgtagttgagcggttttgagtgagattcttaatcctgagttctagtttgattgcactgtggtctgagagatagtttgttataatttctgttcttttacatttgctgaggagagctttacttccaagtatgtggtcaattttggaataggtgtggtgtggtgctgaaaaaaatgtatattctgttgatttggggtggagagttctgtagatgtctattaggtctgcttggtgcagagctgagttcaattcctgggtatccttgttgactttctgtctcgttgatctgtctaatgttgacagtggggtgttaaagtctcccattattaatgtgtgggagtctaagtctctttgtaggtcactcaggacttgctatatgaatcttggtgctcctgtattgggtgcatatatatttaggatagttagctcttcttgttgaatcaatccctttaccattttttaacggccttctttgtctcttttgatctttgttggtttaaagtctgctttatcagagactaggattgcaacccctgcctttttttgttttccatttgcttggtagatcttcctccatccttttattttgagcctatatgtgtctctgcacgtgagatgggtttcctgaatacagcacagtgatgggtcttgactctttatccaatttgccagtctgtgtcttttaattggagcatttagtccatttacatttaaagttaatattgttatgtgtgaatttgatcctgtcattatgatgttagctggttattttgctcgttagttgatgcagtttcttcctagtcttgatagtctttacattttggcatgattttgcagcggctggtaccggttgttcctttccatgtttatcgcttccttcaggagctcttttagggcaggcctggtggtgacaaaatctctcagcatttgcttgtatgtaaagtattttatttctccttcgcttatgaagcttagtttggctggatatgaaattctgggttgaaaattcttttctttaagaatgttgaatattggcccccactctcttctggtttgtagggtttctgctgagagatccgctgttagtctgatgggcttccctttgagggtaacccgacctttctctctggctgcccttaacattttttccttcatttcaactttggtgaatctgacaattatgtgtcttggagttgctcttctcgaggagtatctctgtggtgttctctgtatttcctgaatctgaacgttggcctgccttgctagattggggaagttctcctggataatatcctgcagagtgttttccaacttggttccattctccccgtcactttcaggtacaccaatcagacgtagatttggtcttttcacatagtcccatatttcttggaggctttgctcatttctttttattcttttttctctaaacttcccttctcgcttcatttcattcatttcatcttccattgctgataccctttcttccagttgatcgcatcggctcctgaggcttctgcattcttcacgtagttctcgagccttggttttcagctccatcagctcctttaagcacttctctgtattggttattctagttatacattcttttaaatttttttcaaagttttcaacttctttgcctttggtttgaatgtcctcccgtagctcagagtaatttgatcgtctgaagccttcttctctcagctcgtcaaagtcgttctccatccagctttgttccgttgctggtgaggaactgcattcctttggaggaggagaggcgctctgctttttagagtttccagtttttctgttctgttttttccccatctttgtggttttatctacttttggtctttgatgatggtcatgtacagatgggtttttggtgtggatgtcctttctgtttgttagttttccttctaacagacaggaccctcagctgcaggtctgttggaataccctgccatgtgaggtgtcagtgtgcccctgctggggggtgcctcccagttaggctgcttgggggtcaggggtcagggacccacttgaggaggcagtctgcccgttctcagatctccagctgcgtgctgggagaaccactgctctcttcaaagctgtcagacagggacattttaagtttgcagaggttactgctatctttttgtttgtctgtgccctgcccccagaggtggagcctacagatgcaggcaggcctccttgagctgtggtgggctccacccagttcgaacttcccggctgctttgtttacctaatcaagcctgggcaatggcaggcgcccctcccccagcctcgctgccgccttgcagtttgatctcagactgctgtgctagcaatcagcgagactccgtgggtgtaggaccctccgagccaggtgcgggatataatctcgtggtgcgccgtttttttaagcccgccggaaaagcgcagtattcgggtgggagtgacccgattttccaggtgccatccgtcactccgttctttgacttggaaagggaactccctgaccccttgcacttcccaagtgaggcattgcctcgccctgcttctgctcccgcacggtgcgcgcacccactgacctgcgcccactgtctggcactccctagtgggatgaacccggtacctcagatggaaatgcagaaatcaccgtcttctgcgacgctcacgctgggagcggtagaccggagctgttcctattcggccatcttcaaaactttgggatatttagcttaccttgtttcaaagcttaatataaagctatttcatagagtgtagtatttgtataaggaaagttaaatatatcagtgtaacagaagacaggctccagaaataattccaaatatatacaaccaattgatttataagagtcacctatgcaaatcaatgagggaaataattttttatcttaaaaaatctatttggagagattttataataaaaaaattcctgcaaactattcaaaaatccatcaatagaagaacagatgaataaactatggtatattcataccttgaatattactaaatagtaaaaagctataaactactaatctaaggaataacatagcagaatctcaaatttttctattgaatgaaagaattaaggaatagtagtattcataatgtatgattccatttacatgaagatcaagataaggtaaaacacattaattgtaatagaaatcagaacaacagtagccttaggagaatgaaagataagaagcaagagagaacttttaggaatgatggaaatgttctgtaagtgtcttcctgttgcagatactctgaatttttgatgagttggggatgagtccttacgtggaaacattcatggaaagtattagctctgggtttttttttttgttttattttttgtttttgacaagagctcactctgttgcccaggttggagggcagtggcaccatttcggctcactgcaacctccgcctcccaagttcaagcaattcttgtgcttcggcctcctgaggagctgggattacaggcatgcatcactgcaccaggctaatttttgtatttctagtaacgtcggggttttgccatgttggccgggccaagaactcctggcctcaagtgatccgcctgcctcagccttccaaatgctgagattacaggtgtgagccattgtgccctgccttgatgtatttatttgaatacttcaaaaagaagaagagttacagtgatactaaggaaataattattagtaattaaatggaaatacttagtactttataattaaattattattctaggttgaaaagtaagtatggacaaaatttaaaatttaaaataaatgaaggcatattacacagaattgagtggagaccagtactatggtcagaattgtaaaaaatgagcctggaagataatatactatgaatttcatgatgaatgtcaattgcaatttgctgtgagagagcaaaaaaaaaaagctgtttattacataacaaattaaattgttaaagagaaaaatattgtgaaacattttcagcaaatacatagtaaatttgatgagacgttttctcttgagaagcaaaatggaatagatgaagttagttgcctgaaattagaattaaatgtccaaccaaaatatttaaacaatttttaaacagaatctgagtttataacctttttgagctataaaatggctctgattcttgcacaaaaaagaaatgttggatatagagataagataaattattagtttggttgcaaaaatcttgttagcatattctgagaaagactaaaatgatcttataaaaagtaaaaaaaaattaagtcacctaaaaactgctcatagaatacaagatatttctaacaatatcatggatcaattaattcaaagttagcaaaagcttcaagtactcttctttagccatatatgagttgtgcaatataagataatttagcccaattgatactgtgggtacattttgtctcaaaagatccccaaataaaaaaagctgtcaattcgcagcctacaaaaccagagtcatgacatagatatttttgtcttttatatctgtcaaagaaaaatttctgttaggtatcaaaaaatatttctatcacaatagatgatacaccagctgtattaggttaaaaatctgaattccttggaattttaatgcaagagactgatgtctccctaactgctttgctctactgtataaagaatatacctatgaagtatatacatgtaaatattatgaatcacgactacttcatggaactgttaaaagaaatagaggtcaggcttggtggctgacgcctgtaatcccagcattttgggaggctgaggggggcgatcatgaggtcagcagatcaagcccatcctggctaacacggtgaaaccccgtctctactaaaactacaaaaaattagccaggtgtggtggtgggcacctgtagtcccagctactcgggaggctgaggagaatggcatgaacctgggaggcggagcttgcagtgagccgagatcgcgccactgcactccagcctaggtgatagagtgagactccgtctcaaaaaaacataacaaaacaaaacaaaaaagaaatagagaacaattaatcttatgttctttcccaatgctcatctgtttaatggtgtaagacatttacaaagatttctcgtactttgaactccagttcaagattttctttaaagaaagttttccaaatatttaataataaaggaaaaagaagacagtgattttttttctcaccagtatcacattgcatatgaataagcaaaatctgaaactccaaggaaaggaaagcttttttttcgtgacctagtgaaaataataggaacattcattgaaatgaaaacttttcactgtataagttcataataatgattttatatatttttctagcatgaatcaatatatagaggattttaacaggactgaaaagccttgtgaaaagatgcatgcaatgaagaaataggcaatcttagtaaagaaataggaactataaaagtactaaaggaaaattctagaactgaaaaatgtaatatctgaaattaaacaatttgatagataggcttagcagcagaactgaaatgacagagaaaaagaataagtgaatttgaaaacagagtaacagaagttgtccaagctgaagaacagaaaaaaaatactgaagataaataacaaagacagtgacctgtgggacagtaccaaaagatttaacgtatgagtagagtaaatgcagaaaaaatatttgaagatataatggccaagaatttctggaatttggtgaaaggcacatgtgtgcaaatttcagaggctcagagtaccccaagcagaattaacacaaagaaaaccatacctaggcacctcatactcaaacagctgaaaaccaaaagtaataagaaaatctggaaagcacccagagaaaaaggacacattacataagagaaaaaacaattcaaatgacttcttcttgtaaactatggagacttgaagaccagaagtcggtgatttatatatacatatatgaaacaatatatatctctttatgagtatatatatgtgtgtgtattctttgtgtgtgtgcatatacacacacatatattcatatatctccaaaaaactgccaacccagaattctatagccagaagaaatccttaaaaaataaaggcatttcagtaaaagaaactatgaaaattcatcaccagcagacgttcactccaagaaatgctaagttaagttcctcaaactgtagggaaatgataccagagaaaaattcagatctctggaaagaaataaacagcatgggaaatagtaaatatatgggtaaatataaaagatgaggattttcatcttaatttctttaagcaactgggtgtagcactgtgtgcctatagtcccagctactccagaggttgaggcaggaggattgcctgagctcaggagttcaaggctgtagtgtgctatataacatctgtgaatagccactgaattccagcctgggcaacatagcaataccccatctctaaaaatagaatacagaagactgttcaaatttccaacatgactttccatggattacttatttaattgcaaagaaaaaattcacccataacaatggaaggagctggtggtcaatacatgaatcaagggataaaacatagtttcacttgtaggccacctgatactttacaatattaagtacatgatactatctatgaagtagtcttttgaaaatgtttaatctgaaacccaatcaagcctctaatcataacctccaggtcacagtaaatatagaggacaaagaaacaagttaatcacacctccagaaacaataagacaaacacagcatgtgcaacactatttaggtcaaatctaaagtcttcaaaaagtctatgtcacaaaatgatgaagggtaggctcttgactaaaagagacttaataagccataatcatataaaatatatgagattagtttggttcttggcttgtgaaaaagacagtgctaaaagacattattttaaaaattggagaaatttgcaaatggagtgaatattttaagacattatagggttactgttaatttttttgtgacaatggtgtagtagacatctagaagattatctttgatcctagcagttgtatgttgccttttttttagaggtgaatgatacctaaaacattcactcaaaaaacaggaaaagtgatatatgtaatatatacatatattcatgtgtaataagtatgatatatatatatatgcatctgtgtatatacatagacataagacatgcatggtatatatgtatttgtgtgtatatatgtgttagtatacacataaaaaagagagacatcagatgtactgaaactaggtgaagggcaaacaagccttcactgcaccactgtaaacagctaccttttctgtaaggatgtaaatcttaacattttcataaacttagggaaaacttttccaagttaatatctgtcttttggctacctaactgttcatttctaatttattttaattgtagaggatgcaaaatatgtgttatctgtattataggatttgtgaaaaaatttctttaaaccactctctaattttcaacagctatcctttcattattcaataaatacacattatttattccagcattaatcttcaggggtatgaattctgaatttaaaaatttctcatttaatatattctacaggattttgtccagaataaattatatgaagtgatgatagagcattttcaaaatatcacactcatagggtcttccttctataagatttatttttagtaattctaacaattatcataaaaataatgtatttagtaagcaaatacgatgtgccagatgcctttccaagtatttatattctatattaactagtttaatcttcactatagcatcataatagtgacaacagtaaaaatgtgccatggctaaaggctttccctctcattacattaagagtctctcaccatggtgaaatctttgatgttgactaagttgatagcaatgactaaaggccttaccacattctttgcatttctgtggtttcacaccagtatgaattgtctcatgttgagtaagtcgatcactgcgattaaaggccttatcacattctttacattcatagggtttttcaccagtatgaattctcttatgttgagaaagacctgagatagaacgaaaggccttcttacattctttacatacatagggtttcaaaccagtatgaattgtctgatgataaattagttgagaattaagtctaaaggtttttccacattccttacattcatagggtttctccccagcatgaattgattgatgtgtcttaaggtctccaacacgactgaaggctttcccacattgcttacattcatatggcttcaaatcagtatgaattatctgatgttgaataagatatgaatgaagcttaaaagtcttcccacattctttacattcatgtggcttctcaccagtatgaattctctgatgctgtgtaagttgagagcctctacaaaaggcctttccacaatccttacaatcatagagtttctcactactatgaattctcttatgtttaagaaggcttgagcccttaccaaaagcctttccacattccatgcattcatgaggtttctcaccagtatgacttctttgatgttcaacaagtagatagctgcgaacaaaggccttttcacattgttcacatttatatggtttctcaccagaatgaattttcttatgttggtaaagacttgaacgatgaccaaaagcctttccacattctttacatttgtagggtttcacaccatgatgaattttctgatgcagacacatatgtcgatataatctaaacgtttccccacattccttacattcaaagggtttcaagccaacatgaattttctgatgttctgtaaggtgagaatgacgtctaaaagccttcccgcattgcttacattcatagggtttcataccagtatgaattatctgatgctgaataagctgtgaataaaacctaaaggccttctcacatccattgcattcatagggtttcaaatcagtgtggatttttcgatgtctaataaaatgctggaaaactacaaatgcttttccacattcattacattcatagggtatcacaccagtatggtctctcagatgttcagtaaggtgcaaatattttctaaagcccttcttatattccttacactcatatgatttctctcttgtgttatttctcttatgtagaggaagggatttatgttttttgaatatcatttgactaaaacatcccactttaggtctctgttgtctcccaaattcaattgtgtactgtgggtcagttctgaaaataaacctcataaggttgaaggttttatttcttttccatgtctcctgatggtacgcatttacttcataatttcttttttctgaagataacttgttgctttcagttgtgaaattaaagtctggaagaaaatgaaaaaacaaacaaatgctattttccaataataggggtagggagaggacatctatattaaaaatagtgataaactaaaaagtgtatctgttagtaataaaagagtttagaaaattctaaagtactgccatgcaatttttaaaaggcaagaagggctcagaaaattatgaaagtgcacaggaggatgtaagatttatgagtaggcaaagacaaagtcactagttctcatatttagttgcaaatcagaattaccataggagcattttacatacactatcttttagatatccactcagactgagtggatcagaatgcacaggagtatgtcctgaatatctctattcctaacattatcacattgctctctatataattgtcagtggtttggctttatcttagaatgaaaaccaaacacataaccatgaataaaaggccctgtcttatccacacaaattcatttcaagcccttgatatctgctccctatattgtaccacattgcatcttttcagctgtgagaacacaccacaaatctttcccatctcctggggtgttacatagatgttccacctttcagaaatcctcttaagtggcttctttaaataattggctaactttaagtaaattcatatttttaagtctagattccatttcccaattatttgcctttatactccttctctcaattacatatttactaaatctcatttgttttactacttattttgttaccctaaaacatagcataggtgcaaatcttctttcaactcccattgaaaaacaagtccctaccattggtaagtattacataattcattgtagaatgaaatgttgagttaaaaatgtaaactggatgaaaataaaggtcattggaaaagagagctgagtaaactaaccatttcatttctgaaaattatgtaaaaattatcaggtatctctccctgactccaatctctcactccttattaatcttttacctcacatttactttacaggtgagaaaaatgcacttccaaaatagctcagtcaagaatataagtggaaaaggctgatatgtggccattctgcaataacctgtccccttaaaaatatacatgcctctaccactggtgttcattctttcctttgcatagccatgcttttctgtttctatctcaatcaaagtaatcacgtgttgcattaatttttactgtaatgttttaaataattttttttttaaatctacaaataatgcctgtaaggttgaaggttttacttcttttcattctacacattttcaatctgttgtgtttcttcaatgcctttcccaaattctaccttctattcatttaaagccaaggtggatcattcttgaattctacagaaatgcatctcagtaatttttcaggaattgcacgaattaatatattgaaaggcttatcaaagtcaaagcaaataaacctggggatattgggaaaaataaagtaaaaaatggggcaagagtctaggaaactgagtgcctagtagtttgcaacaaagaatatattggacgtaggctgaagattgataatctgtgtgagggagcagcctttgaaatctaatatgctaaatgggtcaagtattgaaaacaagtggaattctgtgaaaaaagtataaatttaaaaagtcaaaataatacagatgttatcctctgagccaatgcaataaaggataagtagcaatatcaaacagccaaaacacttcctatttataaacagaaagtactcaacaactactcttaggtcaaagacaaaatacaaactgaaactgtagaatttcttgaagacagtgataatggagatactacatatcagaatctatggctttcagttataatgcaccaaggcaaactcaaagattaacatgcttacatctaattaaaaataaaagaattaaaatgaataaatgaagcatttcatttaaaaattagggaaaacagccaggctcaatggctcatgcctgtaatcccagcactttgggaggccgaagcaggcagattgtttgaggccaagagttcaagaccaacctggccaacaataggaaatctaaaattacaaaaattagccaggtgtggtggcacacacctatagtcctagctccttgggaagctgaggcacaagaatcatttgaacccaggaggcagaggttgcagtgagctgagattgcgccactgtactctagcctgggcgacagagtgagattctgtctcaaaaataaataaataaatataaataaaaattagggagacattaggaaaagaatgatggactgcagaaaagaaaaatataatacaagcaaaatttaaataaaacagtagaattaacacatacaaaccattatttcctttatacctaaggaataaaagataggagggaaaatccaaatataatgacaagggggaaatgaccatcaataaagaaataaagaatgttaaaaaaatcatacaactgtgctaatatatttcaaatgtacatgaaatgatgaatcttcctgaaaataaaatttatcaaaagtgacaccagctagacttactggctggcttctagcaaacagaatatgaaaagggaaaaataataactttacagtgaagaaaaatgacggacatcaccttaaacaaatttataaggttaatacctcagcaataaatcatgctgatatcatgtatttctgatacaatatgatgagaaagctacttctctggtattcttccccaaagccgataatcccagtttaatcataaaaaattcaacaaacccaaattgtccggcacttttcaaaatacctgactagtactcttcaaaaagtatcaaggccagaaaggacaaggaaagacaaagaaactgtcacaggtaggaggaaactaaaacacatgatggctaaatgcaatgtgatatcctggattgaatcacggaatagaaaaaaggacagtggaaaaactggtacactgaataaaatctatagttttgctaatagtttgcctatagttttgttaacaatgttaacttgctagtttgcataaatgtaccatgattatgtaagatgttatcattataggaacctgtggtaccacatttgtaacttgtctataactctaaaattatttcaaaatgaaagtaaaacaataacaacaaatagactccagaagagatggaaaatctaaacagaccaatttccatgaaaaaaatagaaaaaaaatttaaaatatttttccccacaaacagctggtcacaattagttagctccctgttggccaggcttcggtctctatatactatttcccattaatgtgaactagggtgccttggagaaatagctaattcctagttcagggagggaagatacaaggcgaatctggaacctcttgtactaaaatgcaaagaagcttttaaagataacagaaaataacttgtgcttttagttatgaaacattaagagggatcagatttccccttttactttatttttatttatttatttatttattttttattattatactttaagttttagggtacatgtgcacattgtgcaggttagttacatacgtatacatgtgccatgctggtgtgctgcacccactaactcgtcatctagcattaggtatatctcccaatgctatccctcccccctccccccaccccacaacagtccccagagtgtgatgttccccttcctgtgtccatgtgatctcattgttcaattcccacctatgactgagaatatgcggtgtttggttttttgttcttgcgatggtttactgagaatgatggtttccaatttcatccatgtccctacaaaggacatgaactcatcatttttatggctgcatagtattccatggtgtatatgtgccacattttcttaatccagtctatcattgttggacatttgggttggttccaagtctttgctattgtgaataatgccgcaataaacatacgtgtgcatgtgtctttatagcagcatgatttatagtcctttgggtatatacccagtaatgggatggctgggtcaaatggtatttctagttctagatccctgaggaatcgccacactgacttccacaatggttgaactagtttacagtcccaccaacagtgtaaaagtgttcctatttctccacatcctctccagcacctgttgtttcctgactttttaatgattgccattctaactggtgtgagatggtatctcattgtggttttgatttgcatttctctgatggccagtgatggtgagcattttttcatgtggttttggctgcataaatgtcttcttttgagaagtgtctgttcatgtccttcgcccactttttgatggggttgtttgtttttttcttgtaaatttgtttgagttcattgtagattctggatattagccctttgtcagatgagtaggttgcgaaaattttctcccattttgtaggttgcctgttcactctgatggaactaccctggaggctctggctgagtactgatatgaatttacatgtgagcaaactaatgaggcaaaggaaagcaccaccatataggggtaggcagaacaatacctgaaagtcaccaagggtagttaggggatagttcctgtttccaccagccaggagtggtaagttggccctaaggctctacaactacttttcccctgaaaaaactccctgattctaagtacagcaggagttaaaagaacagcgtttacaaagaggtagctgagcattatcaaactgaaaaccagcagtgacccatttaattcctggttgtattactgtcatcagcctgcattctatcagactaacagaggaaaacataaataccctctggtggaagatagcatcatctgaaacctcttcagttattttatatgcaatgcccagcatacaatcacaactactagtaacttgaagatgcattaacaaatgacaaataacaagattaaaagaaagaaacaataaagaagcagacccccagatgatacaaaaaatgaggcataaaagaattaaaaaattaactatgattaaaatgttccaagaaaacagatgaaaatttagtaataaaaggaaagcaaataaaagaatgaagatttcaacaagtatttggaagttataaaagagaattaaattgaatttctggaactgaaaaagacaatatctgacatgaaaaacccctctttagaaaacagaataagtgagctggaatacaggtcaacaggaaacattcaaactccatcatatgaaaaatagaggggaaagagaggagaaaagcagataaggacatgaaaaagttgtgggatatgctcaaaaggtctaacataggtgtaattaaagtcccagatgggaggagagaatggtcacctatcttccaaaaactgaacaaagactgccccttctgcatggaatctatcagatcactggaagccaacaggccaactgctagaactacaaaaataacagtaaaaaagagaataatcttaattcattctactactataaaaattatggaggctcttttgtggtaaagagaaaaccatggttttttatgtaggaagattagcaattaaagtatttacagacattctgaacacacatataatttaaaatttgtttttgctgatagtgtctttgcagaaaaataccagaattcaaacctctagtcatttagaaaaagaagtaattataggacagggcagaggcaggcataaaggcaagtgaagaatagtgaagattcaggtgctgaatgggggtgcccattccacctaacaaacttcaaatatgcccatttccacctaacaaactttgagaatatggagcagaaatgtagctggtttcttggcatagaccataaaatatacaacagagaaggctgatattctagagagcatattgtacatcattttgtgcagatattcttacccaatgagaccaagttagtataattctccaacatcacatctctgtacaaatccctctgatccgagtttaaatattcccactcctcctgagagaagtctatggcaacatcgctgaatgtcaatggcacctgaaatgacaaacctgtgtattatttgtaaaagtaaagaagacttttcaagatggaacattaaattgcaataaaggggcaatatgtaaaaagaagtagtctagagttacaagatgatgacatggttagataagagtaaataaattagcatgtcttaagtagagtgcccacacaatcttaaggaatcctgttggagcacacaaaattttcttagtaatattagagaaaaatccaaatatataaaaataaatgaagtcaccaaactttccaaattaaatagtatatataagcacaataccttctacgtacctaagccatataatattaataaatacaagttgttacagcttttctcttcgaggaatatgaaaaaccatgaattgataactaccccctcccccaattgtattataaaatcttttccagccaacacggaataacagggattgaatttaccttcttgtatgaaacaactgaaaatctgaacaaaatatattaaaccatggttttcaagacagaaaacattgcgcaatgatacctgaaagacaagtaacaaatgaggtgaaacctacagtcacactagtttactgtaaggagacaatttctaggctgtggcacagggagcgggaacctaagcaaagcccactggattccactgagaacaagaaaagtacaaaccaatatccatcatggacacagatgcaacgattccaaacaaagttttagcacatcaaatctaacagtatataagaaagggaactctattatgaccaaggctcaatccaagcctgtctcacatttaaaaatcaatcaaggtaatgcaccatattcacaaactacaaaagaaaaaccgtatgaacatatcaatagatgcagaaaaggcatctgacaaaagccaacatccactgctgatatccttggtgaaacaagaaaagaagggaacatccttaacccaatgaatgacatctataaaaaacccatagctaacatcacatttgatagtgaaaggctgaatgctttcctccccaaatcaggaatatagcaaggatatctactctcaccacttctattcaacattgtactagcggttctagccagtgcaactcaggcaagaagaagaaataaaaagcatctagattgaaaaagaagtaaaaatctctttattcacagataacatgattgtctatatagaaaatctaatagaatctaataaaaattcattaaaactatcaagtgagttagcaagctgagaagatacaagctcaatatgttaaacataaatggcattttaattagcaacaattggtggaaattaaaattaaaaatactgaatatcaaatgaaaaatataaaatacttaggaatcaatctaacaaaagatgacaatactaatactctcataactacaaataattactgagaaaaaacttaaaagatctaaacaaatagaaagctataatatgttcatcagtcagatgactcttacctttgcaaacagatccacagattcaacaaaatctcagtcaaaatcccagcagaggccaggtgcgatggctcacccctgtaatcccagcactttcggagggtgaggcaggcggatcacctgaggttgggagttcgagaccagcctgaccaacatggagaaaccctgtctctactaaaacatacaaaattagccaggtgtggtagcgcatgcctgtaatcccagcttctcaggaggctgaggcaagagaattgcttgaacctgggaggtggaggttgc[132 bp omitted]gaaaacacaaaggatctagaataacctagacaacattgaagaagagcacagttggaggatcaaccctactaattggaaagcttaacgtaatactacaataataaagagtatgtggtgtttgcataaacgtagacaaataagtcaatggaacagagttgagaaatagacctacacgtatctagacaactggctttaaacaagtgactaaaggcaattcagtggataaaggaccgtcttttaaaaaaatggtgtaggaacaactggatatctatatgcaaaataaattatccataccttgtaccatatgccaagattaacttaaaatggcacatggagataaacataaaacataaaactatagagcttctatgagaaaacacagtataaaaatctacataagcttggggtgaggcaaagatttcttagatacaacaccaacagtacaatccctaaagaaaaagtacaatctgtaaagaaaagaaaaagctgataaactggatttcatccagaaatggaactctcatacactgttggtgggaatgtaaaatggtattatcactttgaaaaattaaaaacttctgctcttcaaaattcagttaaaagaatgaaaaaatggccaagtatggtggcttatgcctgtaatctcagcactttgggaggctgaggtgggaggatcacttgagcccaggagtttgaggctgcggtaaaccttgataacaaaactgcactccagcttgggcaagagagcaagaccccatctctaaaaaaaaaaaaaaaaaattaaaaagaggctgggcattgtggctcatgactgtaatcccagcactttgaaaggctgaggtgggcagatcacttgaagttaggaattcaagaccagcctggccaacatggtgaaaccccatctctactaaacatacaaaaatttgctgggcatggtggcaggtgcctgtaatcctggctacttgggaggctgaggcaggagaatcgcttgaacctgggcagcagaggttgcagtgagccaagataacgccactgtactctatcctgggtgacagagtgagactccatctcaaagaaaaaaaaaagaatcaagtgacaagcaccctcttattagattcatctttcttaaggtattaaggcactattattaaaaataatattattgtataaagaattatactaatatggcatgtatgttggacacaaattccaacctcttccccatagttcaatatcatctaccacatatcattctagttgattttcctttctacaactctttatagatctgttcctgagttggaacacagtaatgcagaatgatccagaacaaccttgattccctcaggactgtcaatttctcttccactacaaaatgggaccctggaattgttttcatttctcagtgatcccttagctagatccctaatctctctctaggtaagtgataatcccatcttcactcaaacctaaatgcgtttcaaagttgagatctcatctcaaacagactgagaccactcataaccaagttttcccttatctaactgtggagataagggagctgtggagaaagtttccactcctgtagtcaaataggaccattgttcctatgccacgaaaccatgaacctgacaacggcagctcaactatttcaaggtacttcactctttcactgctctaacactgctcttgagagaagactgaacacacagaagatggatgaattatttgaaaataagtgaaaatcagttcaaaaaaggagggcaaatgaggaggacatcatccatcactggaatgggaggaatgtgaaataggttccaagagagagctttctgagataggaggtttcaggattaaaaaaatgaaaatattacatgaattaaaaaatcacaataagtcagaaaagcaaaagagacatcaactcacccgggccatggtttcagaaatgctagttctcttcaggtttcctctatcagagaagcagagttcagagaagccaaagctaggtaatcaaggcatcacctgccaaaagatacgtaactttactaaagagatgtttctaaacaataagatactgtcattttacaggtatttagttgtcacatttaaaaggttgatgatgtaccacatattagtgaggctgtagggcaaagtgcattctcatggtgtcctgtagacttgtgaaaatcaagggcattaatacaggtaagcaaatctctgcataagaacttaaccacgaaaggccatttctgagactctgtccaaaagaaataattataaaatgtgctcgaagatgtataaaagaatgtgatgatacatattagttgtaatgaaaaaagctggagaaaaatctaaagagacatagacaggtagttaattaaataaatgactgtgtattcacataatggaaaataaggtagatattaaaaactattgtgtagatcactggttctgaacaggcagtgaatctgttcttaagagaacgtttggcaatgtctggagacacatttggttgtcataatgtaggcagaggtgttaaggtatctagtggaaagagaccaggtttgctgctaaacaatgtgtgatgcacaggaaagtccctaaaacaaagaattagctagccaaatatgtcaatagtgtcaagggtgaaaaaccctgaagtagactcattaaaggaagataacgtaatccagagtctctataatatataatagattatgccaacacatgataactgttaaacacaaaaaaacaggaaaaagttactaatgagcaggagaaaaaaaaatctcaacagaaacagactcacaaagaatccagatatgggaggtagcagacaagggcttgaaaatatgattaacatgctaaagaaaagaaaagatgagcaaaatggattgcaaaatggagtaaatcaatagagtatcagatctgaaaagataatcacatgaatattttagaattacaaaattaattaagagcttattgcggtggctcatgcctgtaatcccagtactttgggatgtcaaggcgggtggatcatttgaggtcaggagtttgaaaccatcttggacaacatggtgagatcccgtcactactggaaatacaaaaattagccaggtgtggtggcatacgcctgtaatcccagctacttggaaggctgaggcagaagaattacttgaactggggaagtggaggttgcagtgagctgagatcgtgccactgcactccagcctgggtgacagagtgagactccgtctcaaaaaaagagcttattatgcaacattaagtcaaatttacaataatctttctttcaaaaaatcctctatgtctattattattattttagagatggggtctggttctgtcacccaggctgtagtgcagtggtatgagcataactcactgcagcctcaaactgctgggctcaagtgatcctcacacctcagcttcccaagtagctggaattacaggtataaggcactgcactgagcctcaaattaacaataatcttatgcagagagaaaaaaagagaacacaattgaaaagaaaaatgcaagaaacagtgaaaatgtgacactgaacatctagaagaaaataagagagaatgggacagaaaaattatttaaagaaataataaacaaaaacattccaaatctcaggaaataccttgatatacaaatcaaaaaagttgtcaaacctaatcaaaataaaatgaagaaattcacacctagagatatcatagtcaaactgctgaaaaacaacattgaaaaacataatttaaaaccacattgtttaaaaaaaaaagctgtcagctataagaaaacagtaagaaaaatggttgacttctcactagaaactatagtagcctaaagaatggaatttatatctttaaagtgctgaaagaaaaaaactgagaactctgaattttatacccggagaaaaaatttttcagaaataaaggtgaaataaatacttgttgaaacaaatgctaagataattctttatcagtagacccacaatataagaaatactaaaagaaagcattaggctaaaggaaagtaatcccagatggaagcatgaatatgcaaacaagcaatgaacagctgtagatggagtaaagacatgactgatatgactaaacaaatgaattatttaaagcaacgaaaataataatgttttatggggcttgtaatataggatggaggaatgacaataatagcaaaaatggtgagcaaggaggttaatggagttaacacattaacctctattaatgactattgaaatgcccttacactacggggactctattaaagatgcacattatattataatatcttggcagccaggagtggtggctcacacctgtaatcccaggactttgggaggctgagatgggcagatcacctgaggtcaggagtttgagaccagcctggccaacatggtgaaactccgtctctactaaaaatacaaaaattagctgggcttggtggcgtgtctgtaatcccagttacttgggagtctgaggaaggagaattgcttgaacctgggaggcgcaggttgcagtgagccgagactgtgccactgccctccaacctgggcaacagagtaagaccctgtctcaaaaaataaataaataaaacaaaagaatgtacaa[144 bp omitted]tcttctaaaaatacaaaaattagccaggcatgatggtgggtgcctgtaatcccagctactcgggaggctgaggcaggagaattgcttgaacctgggaggtggaggttgtagtgagccgagatcgagccattgcactccagcctgggcaagagcgagactccatctccaaaaaaaaaaaaaaaaaaccaaaaaacaaaaaacaaaaaacaaaaaaaactgacagaggagatgaaatggaataataaaaaaaaacttaatttatacaaaaaaatcaggaaaagagcaattaaaaatataaagaaacagaaaacatatagcaagatggcaggcttatattacagtaaatataaattatagtatattactacagtataatttatacttatactaattatagtaattatagtaaatacaaatgaactaaccattgcaattcaaaactaatattataagattaggttaaaaagaaaaataggatcaattaggctgcttacaagaaacgttctctaaatataaagacacgtgtttaaaaaaatggaaaaaatctatcaagcagtattgcgaagaaaacagacacagctatactaataacaaataaagtagattttaatgcaagaagtattgtaagtaataaagagggtcatattctgcaattcagcaagaatacaacagtagtcctatatttgtatgtacctaataacatagtttcaaaaaatataaaataaatgtcaacagaattaaaggacagacaaattttaaagttagagatttcaacactctctattggtaactactaataggaacaccaaaaaaagaaaaaaaaatccacaaagccataaaagtgtgaagaagattaaccaaattgaaccaaatgaacattataccaaactgcagactacacattctgttcaaatgattacatcacatttatcagaataacattctgggctataaagtaagtatctataaattacaaaggattaacataaaacaatgtatattttctgagcctttacaattagcttagaactcaaaaagaggcagttctcaaatgtttccaaatacagacatactgtggagatattgcaggcttggccccagaccaccatgctaaagtgaacattgcagtaaagtgaatcacatgaattttttggtttcccagtgcatagaaaagatatgtttatactgtattattcagtgtgtaatagcattatccctaaaaaatacggtgcataccttaatttaaatatacttcattgctaaaaaatgctaatggtcatctgagccttcagagagtcataatctttttgctggtggaaggtattgccttgatgttgatggctgctgactgatcagggttgctgaagggtgggatggctatgacagtttcttaaaagaagacaataatgggccaggtgcggtggctcatgcctgtaatcccagcattttgagaagctgaggtgggtggatcacaaggtcaagagatcgagacaattctagccaacatggtgaaactctgtctctactacaaatacaaacattagctgggcatggtggtacgcacctgtagtcccagctactcgctcggcaggctgaggcagaagaagcgcttgaacccagga[132 bp omitted]ttctctgtagcatgtgatgctgtttgatagcattttacccacaggggatcttttttcaaaattggggtcaatcttttccaaccctggtgctgctttatcaactaagcttgtgtactattcaaaattgtttgtttttatttcaacaacattcacagcattttcaccaggagtagattccatctcaagaaaccactttaattgctcatctgtaagaagcagctcctcatccattaaagttttatcatgagattgcagaaattcagccacatcttcaggctccatgtctaattctagttctcttgctatttttgccacatctgcagttacttcctctactcaagtcttgaacccctcaaagttatctgtgagggttggaatcaacttcttccaaactcctgttaaacattttgacctccttctatgaatcaggagtgttcttaatggcatctagaatgttaaatccattccagaagcttttcaattcactttgcctagatccattagagaaatcacaatctatggcagctagagttttatgaaatgtatttcttaaaaaatgaaacttgaaagttgaaattattccttgatccatgggctgcagggtggatgttgtgttagtaggcatgaaagcaaaattaatcttttccatacatccccaacagagctcctggatgaccaggtggaacgtcaatcggcagtaatattttgaaaggagtcttttttttcctttctgagcattgggtctcaacagtgggtttaaaatattgagtaagccatgccataaacagatgtgctgtcattcaggctttgttgtcccatttctagagcacaggcagagtagatttagcacaattcttaagggcgctagaattttcagaatagtgaatgagtatcaccttcaacttatagtcaccagctgcattagcctctaataagagagtcagcctgtcctttgaagccaggcattgacttctctctagctatgaaagtcctagatggtatcttcttccaacagaagactgttttgtctacatggaaaatcttttgtttaatgtagccaccttcatcaataatcttagctagatcttctggacaactggctgcagcgtatatatcagcatttgctgcttcaccttgcactgttatgttatggagatgacttttttccttaaacctcatgaaccaacctctgctagcatccaacctttcttctgtagcttcctcatgtctctcagacttcacaaaattgaagacagttaggtctttgctctggctttggcttaagggaattttgtggctggcttgatcttctatgtggaccactaatctttctctgtattgcagtatctccatatgactcgagaagcacttttcatttccttcaagaacttttcctttgcattcacaactaggctaactgtttggcacaagaggtcaagcttttggcccgtcttggcttttgacatgccttcctcactaagcttaatcacttctagcttttgattaaaagtgagaaacagaggactcttcctttcatttgaacacttagaggctattgtagggctactaactggcctgatttcaatattgttgtgtttcaggaaaacaaagagaggaagagagacaggaatagctggtcggtggagcagtcagaagacacataacatatattcattcagttcaccgtcttatatgggtgtggctcacggtgtcccaaagcaattacaacagtaacaccaaggaccctgatcacagatcaccataaaaataatggaaaagttttaaatattgctagaattacaaaatgtgacaaagagacacagaatgagcacatgctgttgaaaaacagagacaatatacttgctgaatgcagggttaccacaaatctcaatttgtaaaaattgcaatatttgcaaagtgcaataaagcaacatgcaataaaatgagatgtgcctgtgtaaaaggcatacttctaaatagttactggtcaaataataaatcaatggaagctagaaaatattttgagttaaatgatagtgaaagtaagatatatcaaagcttgtgagacgcaggtaaaccaatgcttatgaagatataagctttaaatatatgttttgtcaaaacagaaaggttgaaaatcagtgatatacatcaagaagcttgaaaaggaaaagcaaattaaacctatagaaagtataacataccaaaagtaaccaataacacaaaaaaccccagatatacaataaagaaaaatcaataaagccaaagctatttcattgaagagattaataagaataataaacttctagttacactgatcaagaaaaaattgccaatatcaggaatataaaagaagataacactacctattttactacatacattaaaatcagaattgtatgaacaactttataactttctaataaacttgaaaatgtagatgaaattttaaaattccttgaaaacacaatttgaactgatataagaaattgaaaatctaaatattgttttatttattaaagaaattaaatctgtattaaggatcttctcacaaaaataatgtcaggccaagaggattcagtagcaaattctcccaaacatttaagaaattaaaaatgccaatcaaactcaacttgttctagaaaatagaaaaaaacaaactatgtcataaggccagaataactgtgatatcaaaaccagatgaggatattacataaaaggaaaattacaatatatctgtttcatgaacacagacgcaagcatattaaaccaaatattagcaaagagaaaccagtaacatattgaccaagagagctttattttagaaattcaaaggccatttaatttaattttttaccataacctcaaacaagtataagtttaatttttaaaaaatcaatgtaatctttcaatgttaactaataaaggagaaaaccattcaattatttcattagaaataatccatttaacaatatacaacattaatcatgataaaaattctcagcaaaccaggactagaggggaacttctttcatctgataaaggggacctaaagaataaaaactacaactaccattgtacataaagggatcattatacataatatggaccactgtctttctgatttcaggaacaaggtaaggttgtctactcttacatgtcttttcaattttgtagtagaagacctatccaatattataaggaaaaaataaaaggtgtaaatggaaggaagtaaaatgatctttatttgcagatagtgtagattacatgattatgtacataaaaatattttttaattccacaagctttaaattaaataatttattgctgaataaagggtaaaagtataaaacaattatattaaagcaaagctactgaaaaataaaatttttaaaaccttaacagtttgtaaaaacataaaaaatgtaaaacaggaataaatttaacagatgtgcaagacctttagacaggaaacaacaaaaccttaaggaaagaaattaaagatgaattcaataaatggaaatgtattccatgttcatgaactgtaagactcaattttgagataattctctctaaatttatctactgattcaatgtactgccaacaaaatgtcagcagggcgttttgtttgttttgagaaaattaattaactcattctaaaattatagagcaatgcaaagaacctggaatagacaaagtgattttgaagaacaaagttgttcttcaacttatattaccagattatcaagatataatataaagctacaggaattaaaatggaggtgctggcacaaagattgacaaagaggaccaacggaaaagtagaaagactcctgcacatatatgggcccatgctttacagtaaaagtctgactgcagcttaagagaaggccagtgtttttaacaaacggtgccagtgcacttggatatctgtatgaaaaaaatgattttgaacttcatcccactacatacacagatataaattcaagatggatcataggtctaagtgtgaaaacaaacaataaagattctggaggaagaaacagaaaaataactttgtggtcttgggatagataaaattttcctttttttttgttttaacttttaatttccacttattttagacttagagaaaagttgcaagagtagtacagagggttctcatatacccttcattctagcgtttatcttacataaccaaaggataattatcaaaaccaggaaattaacattggtacaatacgaaaaatttgcacatcttattcaaatatgttttcccattaatgtcctttttcttttccaggatcccacacattaatctacgttgcatttagctgttatttctctttagtctcttccgatctccttagactttcttactgcattaattttcagttgctaccataaccaattaccacgaatttagcttaaaacaacataaatatataaaatctcacagtttccatggacctggagtttagctgggtgctgtcctcaggctggtctcacaggctgcaaacgaggggttacctgggctgtgttctcctctggagttcaactgggggagaattcatttccaggttcattcagattgtagggagaattcatttccctgtggccatacgactgagggcctcacctttttgctgactgttggctggaggttgccctcaggttctgcaggccacctgcagttcctttgcaagatgggcttctccaacattgccacttacttcatcaagcccacaaaagaagtccaatctgctatgagtcttatatggtataacataatcacagtagagacatctcgtcacttttttttttcatatgataggtttatttttattattttaaggaaccttcatactgttttacataatggctataccaattgatattgccatcaacagtgtacaagtgttccctttcctctacatcctcaccaacacttatctattttcttttcttttcttttttttttttgagacggagtcttgctctgtcacccaggctggagtgcagtggcgcgatctcagctcactgcaagctccgcctcccgggttcacgccattctcctgcctcagc[198 bp omitted]atcctaacaggtattgtggtaacatctcattgtggtttcatttgcatttgtctgatgtgcttttcaggtaccacttaaccatttgcgtgtcatctttggaaaaaagtctattcaagtccttgcccatttttaaattggattattggtttctttttcttcaaaattaattaattcatttttattttactttaagttctgggatacaggtgcagatgtgtaggttttttacataggtatatatgtgtcatggtggtttgctgtacctatcaatctgacatttaggttttaagccccacatgcattaggtaatttgtccagtgctctccctccccttgccccccaactccccgacaggctccagtgtgtgttgttcctttccctgtgccatgtgttctcattgttcaacccccacttatgagtgagaacatgtggtgcttggttttcagtttctgcattagtttgctgagaatgatggcttccagcttcatccatgtccttgcagaggacatgatttcattcttttttatggttgcatagtattccatggtgtatatgtgccatattttctttatccagtctatcactgatgggcatttgggttggttccaagtctgcaattgtaaatagtgctgcaataaacatacgtgtacatgtgtctttatagtagaatgatttagaatcctttgggtatatacccagtaatgggagattcctcaaggagctagaaccagaaataccatttgacccatgacttttgccatataaattaacctaatgagaggagtgacatttcctgacctttgccattttccactgattagaagcaagtcaccacctctgctcatactccaggggaggggactaaacaaggctgtggactccaggaggtgggaatcatggggccacctaacatctgcctgtcatacctatcttcatgtcctttcaatttggaagagtaccaataatttattctgtcaaatttccccccgctgggtttgtatgatgtgtttttataactgaaatgaggcatgtattcttggcagtggcacagtaatgatgctgtgtctttcacattgcatcatcatgtccaagggtgcatgatatcaatgttttattactggtgacattaaccttcatcacttggttaaagtgttttctcctgtgttttccttctgtacattactaccttcccatttgtagttaataaacatcttgggagggtaatactttaacactatgcaaatcctctttctcctcaaactttcacccactaactttagcatctcttatcttggtgtccaatgtgaggatacactgcagctcccctatgtacataagttctgctaataaacactttgaattggtcaccctggtattgctgtttctttctttggaatcccaacagccccatcctgggatggtttggggcagtccctttagggaactcccctgccactgcttttggggtgactccagctgagtgttcagcaggacaaaataaggttgtttctggtatttgactactatgaataaaacttctatgaacaccctttacaagtctttgtgtggacatatattcttgtttttcttgggtatatacctaagggaggatgtggtttacctagtttatcagactgcaatgtatataaggtccagttgctcctcaaacttgccaatacttcgtgttgtcagacattttaactttagctattctggtgcatgtgtagtggtatctcattgtgatttttatttacattttcctgataatgatgggaacaccttttcatatgatattatctattttgatatactattgggtcattcaactcttttccccattttttaatttgatttgtcattttcctattgatttctaggaatttataaatgtattttgaacacaagtcttttgtgtgtgtatacagacataaaaaggagggtggaggaggagagggagggagggaggaagggaagggagggagggagagggagagggagagggaagggagagggagagggagagggagagggagagacagagagagagagagaggaaagagttgcctgtgtcttcttattcactttcttaatcatgtcttattataaatagatgttcttaattttaatgaaggcccatctacttaggtatgtccacaataaatgggctgggttatgaaatttataagagggcttaagaaatttggctcaggatcacagctagcttctgtgtgttgtgcaacacattctgatcttccagtgtttcaggccataacctacacaacttcactagtgcctgggaatgttcaaggccttggcttgggttcaaacctgcagggaaaacatgcagctgaacaggtcacagagagatcaaggcgctctgtgaaacatagagagcgagggaaacttggggaacctacaaacctatcatcatgagaatgaataaaaaattgtggtgtggtcatataaaggaagattatataacaattgaaaaaaagccctgttgatttccaaaacaacatgggtgaattccagaagtaccagtttggatgaaaaaagagagatacaagagattccatttatatgaagttcaagaacacgcaaatcttatcttgagtgacaggagtcagaatagcacttactccttatgggagaacagtggattctaactaggacaggacacagaaaaatcctctaaagcagggcacagaaatcttctgtgtcttcatctggctggtgagtacactgatcctttcaaatacaaaaattcattggattatatatatagctaagatgtgggcaccttattgtatatgatacatgcttcaataaaaagtgatgacagaactttatttgatgataatgagtaaaaatattacattacaaactgttattctgttatggtgggtaaaataacacatatgaatatatgcatatgccttgagggatggagatatacatatatatattgtgtgtgtgtgtgtgagacagggactcactctgtcactcagcctggaatgtggtggtgcaaacacggatcactgcagcctcgacctcctgggttcaagctatgctcccgtctcaggtggtggcatggacctgtagctgggactacaggtgcatactaccagacccggctaatttatttttagtaaagatgagctctcattatgttgcccaggctggtcgcacactcctgggctcaagtgatccttctgcctcggcctcccaaagtgctgagattacaggcatgagccaccgtacccaaccaaaaagatctggagtaaaatgtttacagttgttgtttcctcactttgggtttttctgtattttctgaactactatatgagaatgtattacttttatagtaaaaaatgataatagagctaatcaatctaatattagagaatgtaataaaataagttatgaatacagtgatatttggagtacggtgaggaggccttgttttctcccaagtcctaaagtctttgagttgtctcaaattagaatatcaaggctctgagttttgaatactgatatacaacagttttccttttactggttttccctaagtcacttggataaatcctcttgtcactacactctccacctatgaggactggactccctgctccagttcaggaattgcacctaccttagaaataagccattttggttaaaaaatcaattgtttccaacatgcaggaaatatctgcatatgaaaaaagaaatgggactttggcatgctgaggcttttgaaaaattccagtacaatcctgtggcagagaggttccatacaagaaaggccaaatgaaagccacccgagggaccaagaaaatgatgcttcaaggaaaacagaatggaatgatcaatgaatctcaaagaaatccttcataaattcaaacactccagggcctctctagagggtcacattaagggataaaaaagctctagaaatcatattttgaatttaaagagttgatcataaagagtctgctcctgtagcttttcagtatcacaatcatttacaagtccgtctgaaatagtgcagtgatcagtgctccacacagtagaggatgctgccacgttctcagatgttactatctctgaaattataaagactgaagttcccatgtggcccagaggaatagaaagaagtgagctgatcactctatgaaaggagaacagcatgtagaagcaggcattctcaccattctgagctcagcaacagctgattaattaaatatgtaacagggcatccatataatgaaatattaagcaaccatttaatgctaagtttaggaagctgtttaagggaataaaaacattcaagttacattgtcagtgaagaaaattaggttacaacttttaaaaaagcaattaaaaagggggcaaagaatttgaatagacatttctccaaagatgtacaaacggccaataaacaaaggaaaaaatgctcaacaccatgagtcatcagagaaattcaaatcaaaaccacaatacccacttcacactcatgaggatgacaataataaaaagaaaggtaataacaggtgttgctaagaatgtggagaaactggaaccctcttacgctggggggaatgtaaagggatactttcgataataatctggcagttcctcaaaagagttaccatatgacccagccattccacttctaagtatatatctaagagaaatagaaacatatgtctatacaaaaacttgtacacaaatgttcacagcagcattattcataatagctaaaagtagaaacaacttaaatgtccattaactgatgaataaacaacaaaaatgtggcatattcatacaatggaatattattcagcaataaaaagaaacaaagtactgatatatgctacaacccagatggattttgaaaacgctaggctaagtgaaagaagccagtcacaaaacttcacttattatataactctattcatatgaaatgtccagaagaggtgaattcagagacagaaagtagataaatggttgtctatggctggggaaaatgcagagtgagtgctagtgggtatggaatttctttttgaggttatggaaattttctcatgttgacagtggtgatggttgcacaactctgtgaatatattaaatacattaaactgtatactttaaatgactgaattttgtggcatgtgaattatatgttaataaagctgtttaagaattgggttacgggccgggcacagtggctcatgcctgtaatcccagcactttgggaggctgaggcgggtggatccatgaggtcatgagatcgagaccagcctgaccaacatggtgaaacctcgtctctactaaaaatagaaaaattagctgggcgtggtggcatgggcctgtaatcccagctactcgggaggctgaggcaggagaattgctcgaacctgggaagcggaggttgcagtgagccgagatcgcgccactgcacaccagcctggtgacggagcgagactccgtctaaaaaaaaaaaaaaaaaaaaaaagaattgagttacaaatgtatacaattatgcaaatgtaaatatgattacatttataaaatatatgtatttatcaatatatagagaaaaacggacagacatcaataaattgaaaaaagtatggaaaacataaacccatatattaacttacttaatatttgttttatagtcctgggtttctgcctattcctaaaagtatatttcataaaattaaaactttttttaaaaaggcaactatcttacttattcctattttgatttattcttccttactgggataccaagtcatttgaggatagcaactatatctttttgtcttgagacacagttagatagatttttgaatttttaacagagcaatcttttctctgaacaagtgggaaaaaatcctccctgccttaccttttaaatatcttttgatctggaggagaaaacttagtatactctagaacaaaggtcctctaaatatagtccctgggaacttgttaccaatgcagattctctgctctacctcagacctaccgaattagaaactctggggctggggcccagcaaactgtttgaacaagccctgcaggtgattctgatgcatcctacatttgagaaccagcgctgctctaaaaactgctgctgtgttttattgaaagcttttactttattttcatcagttcccattacctgaacccaccctatgattcgtttgcctgtagaaatgtatgtcaatgtaaatcggagactctgatatttcgtatgcattactggtagtctcaaagctgcttcctattatacattcctgatagatgggtttattttacttctgaatctatcctcctaatcacagtgtcctacaagcagctgttaagacatcgtgttccatttaatgtcactttgcatttaacatcattagaataaaaactctaaggtataagatccattttctttcactgagttctcacagttcgatcatatcctgacaatgctgctatagccagaaagatgcctcttccctgtgaactcccaagacaggtcatctgaatttctctagtggcctttcacatcaactatctttcttatccctattccgatttcattttccttactggataccaagtcatttgaggatagcaactatatctttttgtcattgtatcctaacaagtacaagcacatggtaaatatctgatatttgactcaaattttgaaactagggtttatcctcagggaatggctataaaaggaagcaaagatctctgcaaaatggtgttcattatagactagtttttagtcaacaattagaaacataatagctcgcagtaggcaaaaggttaaataaattatgaagagaagggcttaagggccttgaaaggaggctgtaatggcatattcacagatacgtcactgttaggcaggacatttccaaagagaagaaagggtctcatgtctttaaaattaaagagcatcttacaagtaatgaggaaatataaactcacctggactttagctttcagatgtgtagcaaaaattctttcctctttcaggatcttttttttttttttttttttaacagaagggtagcactggaaaagagaaggcaatcatgagacagctggggtttcttggatagcacagtaacttagaaaataccctcaatgatcatacctgctcacctacttcaccgagcacaaccagatgggagtaggagagaaactggaacagtgttgaccttcccaatacaagagaggccaagatcagtgatgcctagggtggaatctgtctctaattcacagcaggttcctggggctggagctttagaaatgctatggttacaaacatagagctggctcctcggcgcttccaagggggaaatatccaggagggatgcctattcctgagaactctttatcgagtcttctcagagcctgccttgaggccgcaaccaatttcaaaaatctcgtctcaagatcaagtctgtgttttcttgctgggatccttcacgcctccatgaatctggcttctctcttttacctgctgcacatcccaagtgtctgtgaggcgatagggctgaggaatctgcagagcctagagcctggagtcacagtgacaattcacacaggtacacaacactgttcatttgtctaacgcacacacacgtacacaaccctgttcattcatctcacacacacacacacacacacacacacacacagtctctcacaggcacacagaaactcctcctctgctgctcaagcagacaggcctgaaattctactgaaactccagggatgacacgccccgttcacgccctgggtcttctggtcttcagcgcctctcatcctcaccgccggttccattccaaccagggactgtggaagcctccgctgatttctgtggagacgatctactcaccacgtaggggctacagcagctcggacaccggaaaaagatctagagctcgagggtgaccctagcgcggtgacttctgggaaatgtagtccacccggaataaccatgtccacggcgcccgccattctgtagcctatgctcggagggcacatgagcaagagcttgaccatctgtaccgttggttgacttgctctattaagggctatgatttcaggtcgtcctgcgtgtttagaggaggcgagtggaatcttgagtctcggctggagaaggcagagcacgggcatgcagacctcaaagcctcaaacctgcgtgtgagaggagaagttggcgagctccagcgtatggtccacggttggtattctaggtgcgagctgaggacaggggcttttgtttttcgcgctcccaggtagcgccagcacctatagtagctccaggagcacagaaggcgttaagtgtgcattggttttagagaaagaatgcctgtgcgttttgtgttttcactctgtgacattgtgaaattcattgtgtgagaacatggatggggttgtattccggattatggtttgtttctaagtgtgttactttggacatgaaatggtttgtttcagattttgagattatgtaaattttttaagccctctcccttcactcctactcccactctgaaatttctcatgcccaattgccattctctcacttaaaatacgagtctggctgatttgtccaaggtaaatactactatggcctacttatccattaggctgaatgggcaaagtaccgagagcccacagaaatgttttctttcaaaataagaaaatgaattttaaggtcaaagaaacttaatatcgtagtctactggcgagtgtataaattgatataatcacttgggaaaactatttggcaagatctattgaatttgaatatatgcatttgctataacctagcagttccattcttacctttaacccaaatgtaagtgtatacatattcaccaaaatacatgaatggggatgtttgtggcattgccatttttattggaattgcactcaatatatgggtacttttcaggaaaattggtattttaaacattgtgaaaaggctgggcgtggtggctcatgcctgtaatcccagcactttggggggctgaggtgggtggatcacttgaggtcaggaggtcgagaccagcctggccaacatggcaaaaccccgtctctagtaaaaatacaaaaattagccaggtgtgggggcccgtgcctgtagtcccagctacttgggaggccgaggcaggagaatcgcttgaatccaggaggtggaggttgcagtgagccgagatcgtgccactgcactccagcctgggagaaagtgtgagattctgtctccccctacaaaaaaagaaaaagaaaattgagaagggacctccaggaagatggaatagatgtacttttttctatttgtccagctaagtacaataaaaaccctgggcattagttataaaaaaagagaaaaagaacactgagtggtagagaaaaggtagactggtgctgagttcccttgattttctttgtgcctcctttgtgccagacttaaagccaaagaagctagcagtcccaatacaccaatgggcacagacaaaaaagtcccagcaaaagcctgctgtctttagccaaaagacaaggaagagggcagcctagcaagaaggaaaacttttagacaattactgccatgctctagtcaaaacaccacaggaaaaaccttcagcactatccccagcatgccagcaaagacccatgcttccactcttgcctggagagttaggactttcctccccacccctcaacccagtgctaacagtagaagccacatggagtgcagtaataaggcactcctttccctccaaattagaaaggtatcagtggaggtctagtgggaaaccggaactcccacccctgccactagtaatgaggagcccccctgtgggtatcaatggaggctgagtgggaaatctggatttctgtcaccacctaataataatgaggcaggatccacttcccctaccacagtgatgtcagaggagaacaggtgatataaactgaattgtgtactccactccctgagttcatatgttgaagtcctaactctcagtacctcaacatgtggactgtatttggagataaggtctttaaagaggtaattaaggttaaatgaggtctttggtgtgggccctaatccagtatgactggtatccttataagaagaggagatcaggacacagatacacaaagggtgtgtgaaggtagcacgtttaccagaagaacatggccatctacaagccaaagagagagacctcacaagaaacaatactgctgacaccttgatatcagacttctacccttcagaactgtaaggaaattaattggtgttgtttaagctgcccagtcggtggtactttgttaggtatgatccagagcctcagatcagaaaaccaaaaatgttcagttctaacagaaaatcacttaccacaccaagaactgggaagatctcaaactgaatgaaaaagactcaatagatgcctacactaggatgatagaaatatttgaactatttgacaagaattttaaagcatccaccttaaaaatgcttcagacaataattatgaacatgcttgaaataaattaaaatatagaatgtctcagcaaagaaatcaaagatataatggaacaccaaggaattttgactcctgagaaatttagtaaccaattaaaaactcattggatgtactcagcagcagaaaggaaagaacagaggaaagaatcaggaaactggaagacagaacagtagaaatgacccagaatgaacaacagactggataaaagaccaaaaacacaaaaatgtgtaaaactctacagaaattgacataacaattatagttaaacatagtaatactctgctgacaattgatagatgaaaaatcaataaggacagagaaaacttgaacaatattatcaaccaattaaatttaattgacattaacattctgccaaacagcagcaaattgcccaatttttccaagtacatatgtcaagataggccataacctggaccatgcaacaaatctcaaaagctttataaggattcaagttatataaaatacattctctattccacaatggaattaaattaggaatcaataacaaaaagatagcaggaactaaataactttttttttttttttttgagacagtcttgctctgtcacccaggctggagtgtagtggcacagtcttagctcactgcaacctccacctcctgagttcaagcgattttcctgcctcagcttcccaagtagctgggactacaggtgtaagctgtacaccaggctaatttttgtatttttagtagagacagggtttcgccatgttagctaggctagtctccaactccctagtgacctgcccttctgggcctcccagagtgctgggattacaggtgtgagtcaccacacccggccagcatttcagagtctataggtcaaataaaataaaataaaaaataaaaacaacatatcaaaacatataggatgtagataaaataagacttcaaggaaaatttatagcattaaatgcctatattaaaagagaagagtgtctcagtgactgatatggtttgggtttcagatgctcttctttttctcttgtttcttaagataaacactgtattcgtccatcagtgactgatatggtttggatctgtgtccccactaaatctcatgtcaaattgtaatccccagtgttgacggtagggcctggtgggaggtgaatagatcgtgggtgtggagttctcatgaatggtttagcactatccgcctttggtactgtatagtgagtgaattctcaggagatctggttgttcgaaagtacatggcacctcctcccttgctctcttcctcctgctccagccatgtgatttgtgccataagtaaaagctccttgagacctccccagaagcagaagccactgtgtttcctgtacagcctgcagcactgtgagcaactaaacctcttttctttataaattactcagtcttagggatttctttatagcagtgtgagaacagactaatatagtgacctaagcttttaccttaagaaacaagaaaaaaagaacatctgaaacccaaagtaggcagaaggaaacaaaaaaaagagagaaatccatgaaatgtgcacacctgttcatgataaaaaacacattcaacaaattagaaatggaagggaacttcttcaacataccacctataaaacacccacagccaatatcatacttaatggtgaaagacagagtactttctaagatcagggacaagacaaagatgtgcactctcaccactttttttttttttttttttttttgagacaggagtcttgccctgttgcccaggctggagtacagtggcgcgatctcagctcacggcaacctccgccttccgtgttcaagggattcccctgcctcagcctcctagtagctggaattaaaggcacctaccaccacgcccgtctaatttttgtatttttagtagagatggggtttcaccatgttgcccaggctggtcttgaactcctgacctcaagtgatctccctgcctcagtctctcaaagtgctggaattacaggcatgagccaccacgcccagccaactctcaccacttctatttgatacatgctggaggttctagccagggcaactaggcaaataaatgaaataagagacatccatatggaaatgaagaagtacaatgaagaagtaaagctatatttgcagatatgattttatatacataaagtcctaaggaaatcacaaaaaactaataagactagtaaatgagttcagcaaagttacaggaagatcaatatgcaaaaaaattgtgttcttacacactagcaatgaataatcaaaaaatgaaagtaggaaaacaattccatttacaacagaatttgaagaaaatacttaaggaataaagttaacaaatgaagaggaaagtttgtacactgaaaattataaaacatcattgaaagaaattaaagacgacctaaataaaaggaaagacatctgtggttcatggataagaaaagttaatattgttaagatgccaatacctcccaaattgacctatggattcaatgcagtccttaacaatatcctagctggctcccccctcccaaccccactgcctctagaaattgaccagctgatcctaaattcatatggagacacaagggacccaaaataaccaaaacaactttagaaaggaagaacaaagttggaggactcgcatttcccaatttcaaaagttactggaaaactacagtgtggtactggcacaagggtagacatagagatgagtggaatagatttaaaagtccagaagtaagtcttgacactgtcgattcattttcaataagggtgctacggccatttagtaggggaaagaatagtcttctcaacaaattatggtaagacaactggatatctgtctgcaaagaaagaatgaagttggaattctactttataccatacacaaaaattaactcacatcactgacctaaatcctataggagctaacactataaaactcttcaaagacaacacaggggcaaatcttcatgagcttggaataggcaatgatattttggatacaccaaaagcataagcaaaacaataaataggagtatatcaaaattcaaactttttactgcaaatgataccatcaagaaagtgacaagatacccactgaatgggagacaatatttgcccatcatacatatgacaatggacttgtatctagaatacaaaaactcttagaactcaacaataaaaaaaaaatggataatccaatttctggaagtcagtcagatttctgggatgatcactcccatcctcacaacaacaacaacaacaaaaaaaactaaagaaattaattttttctggatctgtcagataatagaggtcacaaggcaaaccaccagccttaaatctggagagacaagcaaacggagatcagcttacttggagcagaaggaccaaggtaagaccatttaggcggggaaagaatattggtaactaagtgttaccaataacactgctaattaagtattaccagctaattggtaatatttactagcagtgtaattaagtattaccagctaattggtaactaagtgttggtaactaagtgttaccaattagttgataacaagtaattagcaatgctattggtaggagcgcttaattggtaatttagagaattcattggaggctagcttcaaaaatcttccagggacgcagtcttagggggagcctcacactttcatggaatttacgtccagtaatgctactaggttctcatggtgaatttacaagaaaaatctcatgttttggaggaggacaaaagtaactattttgaaatacactgagagtgttccacataacaaaggactgctatccaagggaaatgactttatcagatacttatataactggggagaaaggcaatatgtcaactcgccttcctgtcttacctaaggggaaaacagaaagactaagaactgcgtctgaagatcacaggccagggactcaggcccactaaaagacagattaaatcatatgattgtagaacacttcccctctccccacactttaccaccatatcaataggattcttgtataacaacaggataataaaagtgagaaggctgcaagacacagattctatttttaaagttcttagggaaattcaaagacaacagggaaggaaaaagaagggacactacagaaaggtaaaactgaaacctctgacaccttcagctaaatcaaacattaaacacagcccaacacctagccagattaacataaaacctcacacttaactgaagctcccacattgcctgctatatagctgtctacagctgtgtattctcctgtcctgcacaatgtaatcacactctgcaagaagctaaagcttactggcaggcccttacttatctaggtatatccaaactctgatgaatgacggcacacagggacctaccattgccaatgacctactcttctgcatcaaggaactgcagattagatttgtccttgtcccattctattggctcctcatgtgatgcccttttggtgtaagccaatgccctacaaactagccaacttacacccattggtgccacaccacttaatttcatcctttgggtgaaatgacccctacacaaaagcctttaaaactatacttcccttcatgcttaacagttgggacctggacatgataactacccctctgtggtctccacagtgacctccacaaccacatcagcgccagtcccattgtccaacaatccatgcttcactctgcactattccttcatcatgacaccacatcctactttcttcaacttgccagataatacatgtgaaacagtaacagaacatgtcatccaagagataaaactccaacaatgctgggcctgccagcaggcgtcccaacctgggtaaccactcgtacaactgatttccacactcttggaggtatgtgatatccatactactaaccagtcgccatcctctctggtcaccctccagctcctttacttccccaggcaccctcaacctcatcaggttcttcctctgaatttttccttcacagtcccacctttcctgccctctgtcaacgattgatattatataaagccattgaaagtacaagggcctcacacgtatgcactggtgaatgcccttcccataaaaggggataccaggccacctttttgtatattataaattgggcctcatcacaatctttggtataacaggcataagtctagatcttttcagttctgtagcagacttcattcttagagctgccagccaaacaacgtcacaattcctggcagaccatatgtaccaaacagcccaagatttagaagcccttaatgagataaagctctgtagctgtcatggtagttgataaaatactgcattagactaactagtggcatctcaaggtggccctctgaagggaacctctggctgtgtgaaggtcagtaaaaacaggaaagctctccagaatcgttcagtagataacaaaccaaaacagtcaacgaagttactaagttactaaaatgtggcaagagtttctgaatccctatttcttctcctgactgcttccttctgcctggattaacattatctggcaccacattatctttcagggagctattataattgctggcctaattttattgggtcaactttgcatatttggcctctctcaaatgcaagtttatttataggaaacctaggagtttgctgtgctaacccaaacatcaggggtgaattgtgaagactggaggaaacttggtgtttgacttagtgcaagccacctataagcatctcttgcctatgtccagtctccctcacaatcctgatgaggttcacttactgctccacaagtgcatatgccctccaccacctcttttaaactgtgtgctggcaggacatccccttttataaactgcctgaacattgactattctgttttggatcttttcttggacagccctcccaccccgtaatcatctttctttgatcattccaaaggactaccgtcaggagtttgacatacaaacctaaccttggaaggagtttcgacattcaaacctaaccttggaaggagtttccccacatcatagtagaggtgctgtaataggcatatagattgggagggaaaaacatttttttttttttttgcagatgacaagattgtctacacagaaaatcccaagcaatcaatagaacagctacttaaaccaatactaagtttagcaagatcataggacacaaggtcaacataaaacaatcaactatattgaaaaagaacaattggaaattgaaatttgaaaaacagtactaatttagaaccctaaaaaaggaatatgtaggtataaatctaataaagtgtgtgcagaatctatatgttaaaactacaaattactgatgtaataagggagtcctaaataggcagatactgtgtgtatggtttagaacattctcagtattgctaaaatgtcagttgtccccaaactcatctatatattcattgcaatctcaataaaaatcccagcaaattatttttacagatgacaaagctgattctggaaattatggcaagacaaatttgatagccaaaataaaataatgagttggaagactcacagtatctggtttcaagacattatatacagatacaaaagtcaagatgtgcaatatttggcaaaatgatagacacataaatcaatgaaactgcactgaggccagaaaaagacccatacatgtatggttaatggattcacaaaggtgccatggcaatactgaaagaattggattctcatatgcaaatagtggacctcccttatataaagattcacatcttatataaatactaactcaaatatatcatagacctaaatataaagcctgaaaacataaaatttgtgataaaaaagtgggagaaaatctttgtgaccttggattaggcagagttcttatatttgaaaccaaaagcacaatccatcaaagacaaaaaaggaacttcattaaaaaaaatttcttgtgtgaaaaatactgttaatggaataaaaacacaagccacataatggtatacaatatttgcaaaacacataactgacaaagatatctatccagaacatataaagaactctcaaaaatcaataagaaacaatccaggttttaaaaaaatggacaaaagatttgaacatagttcacaaaagaaaataggcaaatggatagcaaacgagcagtggagatgctcaatggccattagggaagtgtaaattaaaaccaaaatgaaatcccgctataaccctttgaaatcctaacaacaaaataaaaatgaaaccaaaccctgacataccaattgtcagtgaagttaaggaactgggactttcatacactggtggtgggaatgtaaaatggtacagttattttagaaaagtctgtcagtttttcatagataagtatactgttaccatacaacccagcaattccactcctaatatttactaagacaatgtggacacacaaaactgtttgcaaatgttgacagcagctttcttcataatcactgaaaactgaaaacccaagtatcccaccagtgataaatggataaacaaactgtggaacatccatatgacagactactactcagcaataaaagaaatgacttctgtactgatatatgcaacaagacagatgagtctcagaagcattaagtgaaaggtgcgactccaaaggaaacatactctagaattccatttatatgacattctggaaatgatataaactatacagacagaaaatgagtcagttgacaagggctggtggtggggagaggagctgactaaacagaacaagcaagtttcagggcagggggtactagaactatagactatcttgattgtgatggtggtgttcacataacagcacttgccaaaatgcatgatagagtcagtttcactgtatataaattattccctaattaaaaaaagaatgttagcttatatgattttcatggatgccttttatctcattgaagaattttttcatcatgagtggatgctaaattttgtcaaatgttttctctgaatctactgagatgatcatacatttgatcataagaatccagatataagagtacatactaaatccataggaagctcaggaacagacctaattaatttatggtatagaaatcataatacttggcactggaggtgggattgactggaaatgggcacaagaaaactttttggtttaatagacatattgtatacattgatcttggtgatgattacatttgtcaaaattcagaaagccatgaacttgagacttgtgcatgttactgcatgcagattacacctcaataaagtactgttaacatacaaaacttctagttgctagccagaaactgatttctgaacccactaacaagctgcaaccttcagtttgataaacacttgtccacgagatctgcaaaaatgggaaaatcaggccatatgactaacttatatatcctccaagccttgcagaattcttctgagtacaattttagagaaacttctagagataaataaaaatgtcaaatattactgaatttcaaatatgacagtaatttcaaatactactgaaaaattacaacgtattaggcactgaaaaggcagagtagatttggcagtcaacaaagtccctgccctcttggatcttatattctagtggaacagaattcagcatttctatcttagtacttctgatttactccagatcagactcatccttcctgatcctcttgtctgcatgtatcagctaatggtcaatgttctgaatgcagtccatatgtctccactcttgtgaggcttctctgctgtgtggtctcccaatcacttggctgaactactgactctataaaacaaatgttttgtctatgatagctctgattattaaaatatttcagcacccatctgagatagtaaaacatattttatcgagttttcctgtgtgaatcctctgatgaaggaaagtccttgtcaccctcatcatcagcatggactcgctgatgaatgataagacttgagctccaactgaagcccttcccacactcctcacatttgtatggtttttctccggtgtgaactctttgatgggcttgaaggtatgagctccagctgaagactttcccacattcctcacatttgtatggtctctctcctgtgtggaccctctggtgggcttgaaggtaggatctctgtctgaagcgcttaccacacacatcacatcggtatggtttttctcctgtgtggactccacgatgtgccagaaaattggaggcccgacagaagcccttcccacactcctcacattgatagggtttctctccagtgtggcacctctgatgggcttgaagctgtgaacctacactgaagcccttcccacactctgcacactgatatggtttctctccagtgtgaactctctgatgcacctgaaggctggagaactgactgaaggccttaccacacctctcgcatttatagggtttctctcctgtgtggattctacagtgtacattaagatctgagctccgactgaagcccttcccacatgtaccacatttgtagggtttctctccagtgtggcctctttgatgggccagaagatttgaggcctggctgaagcccttgccacactcctcacatttatagggtttttcccctgtatggactctaaaatgaatgttaaaatctgagctacgactgaagcccttaccacatgcatcacactgatacggtttctctccagtatggcctctttgatggtccagcagatttgaggcccggcagaagcctttcccacactcctcacatttgtatggcttctctccagtgtggcttatctgatgggcctgaaggtgtgaacccacactgaaacctttcccacactcctcacacttatagggtttctctcctgtgtggattctacaatgaatattaaggtgtgagctgtaactaaagctcttgccacatgcattgcatttgtatggtttctcgccagtgtggattcgctcatgagcctgcagtcgtgaacgccaactgaagctcttcccacactcttcacacttatatggtttctttccagtgtgaactttcagatgaacttgaagatatgatctctgactgaagcccaccccacactcctcacatttatagggtttctctcccgtatgaactatcagaggagcttgacaatgtgagcttttcccaacattcctcccacactcttcatatttgtatggattctctccagtgggaactctctgatgatggggaagatgtgacctctgactaaaactcctgtaacttgcatcatttgtgtatgattttgctctactgtggactctctgatgggcttgaagacttgaaaaccgacggaaggcattatcacatttttcacatttgtagggcttctctcctgcatgagccctttggttaatttgaagatgagagctccagctgaaacttttcacacaatgttctcctttgtagggtttttcaccagtgtggactctgtgaacttgaagatgggaactctgattactgaatccctcatctttatagtgcaaatcatctcgtttttccaactggcagcctgttctttgaatatttaccacagaatcttgatacttgattaactctcttgtaatctgttgccagatctgggagcagaaaagctcttcatgaggcaggtaccttaatcctacttcttgaagagtctccatctcttttagattcttggctcctaaaaggataaagaaaatgtggagatggggcatgtgaataatgttttgttccaagatgtcaagtttataaactcgggcccatagcctaaggcttcattgaaccaggagaaggttccattgcctactgcatagacatctgaacaaagtggccctgttcaaaatgtctagtaaaactcctacacataaattttcaaaaacctttgcctgggattatttcattggaagtttattccaaggttgggagatgttgaggcactgtgctagttagaaagacacatttttcagaaaataccttatcacctaagtcagggcccccaacccctgggccgtggatcagtaccagtccgtggcctgttaggatctgggccacacagcaggaggtgagcgggaggccagtgggcattactgcctgagctctgcctcctgtcacatcaatggtgacattagattcttataggagtgcgaatcctatcgtgaactgcgcgtgcgagggatctaggttgcgtgagaatctaatcttatgagaatctaactgaggtctgatgatctgaggtagaacagtttcatttcaaaaccatccccccgaccccagtctgtggaaaaaccatcttccaacaaaccagtccctggtgccaagattggggatcactgacctacatacctaaagttcgagtgtaaacagatagtggtcctttacctcttgctaggaaatagcctccatgagaacacctgggagaagaggtttatggtaataacacacattattctaaaacctgatagcaattaaagtttccataaccaccaggggggtt[132 bp omitted]cactctgtcacccaggctggaatgcagtggcacaaacatggcttgctgcagcctcaacctcctgactcaagtgattctcctgccttatccccccaagctgctgggactacagaagcacaccatcacacctggctaatttttgtacttttttgtagagatggggtttcaccatcttgcctaggctggtctcaagctcctgagctcaagctatccacctgcctcagtctctcaaagtgttaggattatagctgtgagcccccacgcctggcccagtgatgcctctttatcactcaatatcagatagtaaattctccccatctacattacacccctggcaatttccattcacctgttttgttttgacaaagcacatattaccctctgacaaactatatatgtcccttattattttttatgtctctgttgaatggatgttgccatccatgagaacgagcattttatatcattcaccactttatcatcacccaagagctctgcctgactcaacacagtgttcaatagatgtgttgaataaaagaattcccacttgtcttctctgggagactttgagccaaattacaaaagtgaaagaactttttcaagtaaacgatgcataatgggaaagggactggaaagagcgattcttctgggaagtttaaaggtttcaccagattcagggctaagtggatggtgctgataagaaaatcatgctgatcacaaaatcatggtaagaattacttaggaaaaaaaaaaatcataaggcagaaaagtggccaggggatctagggactgattgcttctaaaatttttgttctctgatttttcctttttcaagtaggagtcaatatttagagcctcgggaataatgttttctctgaaagcagactataaaaatggatggatgtaaatatatttttctatatagatcacaccattgtttttcaaactgaaggctaggactattagtgagttggaaataaattcagttgcttgtgacaagcattaacagaaaagaaaaatattagacgtgttttgtaagcaagaaatgtatttctccgcataaattcttgtttaaggccacacacacacacctacccatatgtgaatgtttgtatttatgatataaaatgtatttcttattgtaactcatactcaaaagtttgaaacctcccagtctaaatgattaagaaaggtattaatttcttaatcaaacaaattgttcaaatagaaagttacattgtaataatggaaacttgggaaacagataaatgtgtttcctttaagttgaagcctacatagtttgtcatgtctgtatatactttgcaagttttcacttttatttttatttattttttttgagatggagtttcactcttgttgcccaggctggagtgcaatggcgcgctgtaggctcactgcaacctccacctcccaggttcaagtgattctcctacctc[223 bp omitted]tgagaatgtgtcaatttgaggagggcaatttccctattttgcccaggttataatgtttctaattgaaaatgatatgttaggcccttattacaatgcagagaaaactaaaatctaccttctttagtatatgtttatttaatggctatcttctataacatttatttgcttagtggctaattttgtagaaaataaaggcattgccatacataccatatttgaatagggactactaaaatgataagtaatattcttttctgtaactctctttggaagaggtggatggttgccacaaagaaaatttttaaagggaaagacttaaaagctattctctaaacattgttttttccttgtgtaaagtgtttttggggacctgcctaaaacgtggctatgagaacctttattctaaaaagtagttcttcaccaagtgagcaagattcactattaacagctacaggaaagccacaagggggaaatgatactcaatttgattacaactaaagctaagctttcattagatgtgagtgttatggtctcaatgtgtgtgcccttgccatttgtatgctgaaatcctaactcctaaggcattaggaaggtgattatgtcatgagggcagatctttcatgaataggattagtgcccttataaaagaggcctgagagagatttcttgccccttccctgtaaggacgcagcaaagaaggtgctgtcattggatcaggaagtgggccctcagcagacactgaatctgctggtgctttgaacatggacttcccagcccccagaaatgtcagaaataaaattccgttgtttataattcccccagtcggtagtattttgttttagcatcctgagcaaactaagtgggttaatgaatacagatcttcatatatccaaaagcacccaataaattagaattagattagatattcatcagggggaaaaaaactgttctagactatgccttcgtcacacatttttgtttgccaaccttggaatatctccaaggctaacagaaaaatgtccagcagccccagcccctcctcacctgaggagttatctctctgggttgccatcttcatcatccacagcttttcttctctctctaactgtggtaggccatctggtgtggactgatgccctgtgaaaaggcaaggacataggtttataattaatacatcagaagccaaaattactcaaaattattgtcctcatttcatcgtcttcaggacatcaaacttagtgttttccacacttctaatcatgacccattggaggaagtatatttcatgcaaagacccaagatatgcagatataagtataaattactgggaaaaaaaatgttttcatcataccccctccattgtctctcacattcttcttggcaacaggacatagtttttgctgcaatgtgcagttattgccaagtgctctgacattttctaccccattttatttcattaaaaaaaccaatggtacaattcatcaaatgtatatcaggacccactaactggagatgaccacaatttgagaaaggataaaagtgtatagttgtcatgctgtcaatttatggttcattaacaaaatacacacttttgccaggggagaaagactttaaaaattccatatctgtcttatgatggatgattagaaaactgaaaaccagttcaagagctccaaagccctgtatacccaaggacagagagacaacagagggagccaatgttcagtcagagaatgcctgtcctcacccactgagaccacattcctgaagttctccagcatcacatctcggtacagcttcctctgggcaaggtccagcagttgcagctcctcctcagagaagaccacagccacgtccttgaatgtcactgcctcctacaacatcaaacacactccacctaaatcttgcaataaaggtccactggaaaagggatagcactgagaaatgtgaaaaagatgtgtagggaaaggtgtcagattcttaagagaccatattcaactttattacagttaaacacatataaagtgtattatattttaggtttttccttttcataataaatgctgtaaagaacaactttttgcatagatattacccacctattttcttaggtaagttccaagaagtgaaaaatcacaatgtcaaagaatatgcaacttccaaattatgatgtacgacagattttcttttcaatttttccctgtcttatccttcccccaagataaagtatcattgattttccataccatagataacactgaatataaccaatttttaaaaaatcctaggcaatctgttcattaagaaacaactgggttttttggtctgtaattaactagtaagatcatattttcgtatatttactggacatctttatttttctttggtatctcacctgttactgtccttttattgatattccatttagaattttatcttataactctgtaaaatttctagtgatgattttaagtcgttttttagcatatacgttgttgttcacctacattttgctggtgttttatagctttgtgttcaggagtgtttcttaaactcaacactattgctgtcttgggcgggatagttgtctgctgtgtgggggtgtctagggcactgtagggcattttgcagcacccttagcttctacctactagatgctggtagcacccccgacctgtggtaccaggaatgtttccagatgttgccgggtggggggggggggcagtgggcggtaaagtcacccatgataaagaagcactagcatatcgtattggtttttttttttttttttttgagacagagccttgctctgttccccaggctggagtgcagtggtacgatcttagctcactgcaatctccgcctcctgggttcaagtgattcttgtgcctcagcctcccgagaagctgggaatacaggcgtgcgccactatgccaggctaatttttgtatttttagtacagatggggtttagccatgtttgtccaggctggtctcgaactcctgacctcaagttatccacctgtctcggcctcagaaactgctgggattacaggtgtgagccactgtgctcggccagcattatcatactgttttaacttttcatatgaagactgttcatccctggagccctgcacattcaggtaccctaaatgaatgacagtggtcatagagaagaagaggccactggagagtgaatcgagtaggggcagtattagctgaggcatcttccactaaccaggacaagctaggcacccacacaaaaagggccaggtccactaagtggagaattctttttctttgcctctctctcttcagtcaagtaaaaatcctggagtcttttgaaatcagttggatctttggtatcctatgtgaaactaagcaactttccacaattctacagtcttgtttctttgtaattaaaatgcacatgagaccaaggactgcctcataaagttggtttgaggaataaatacagtaagagaagtatctggtaagtcctcttgtactgctagacttttaaaattaagtacattattacttcaataaaataagttaacataagagtaaaagaatacggatcagtaagtaaacatacatagggtataactcaggcctgggtaagaaaaatctagctttcttttgtggaaatatctaataatattttctctaaaatcagtggcatcatgtcacacgatgtcatatctgaatcattgacataggaactacccaaagtaccacatatcaaaagtactttttcaatatagtgtttctataacattaaaagtaaataatagcaaaactccttcaaattgctttttggaaaaaatggttatttgtgggaaaactgtagtaacaattttcagtaaaaattctaaactacctaaacattgatgaatgaggagaaaagttatctcacatacacaccacagagtaacatcaattcaagggactataaaaatatggagcaagtaatattaattagaaaagatgtaacttgaacattttgtctatacaatgcttataaatacgcagttatgaatacatctgaggaaaagaacatggaaaatcaaaacagttgttttgtaagggaaacagtaggaaaatgagagatttttattgttactgacttttctattctatgcttatttatcaaattataaagtcataaaataaagcaacaaaaattaaacaacacaaaagtaaaaagcagcaagcatttggcacacaagaggttctcaaatgtctaccgttctccttcatcttcctaacaaagagaataaggtgtatgtaatctttccgaaatgagatgacaattattacggagaaagggaggtccaactcaccttagacttcgtcattttgtcctcctccttctggagaagtgccaagtcttaagagggaaggagaaaacatgagggaaggagaaaaaagccatgagagtttggccaaaaaaaaaaccatagctgtttttttgttttgttttgttttttttaacgtgaaatagcaacagtgttccttcctcgggctggcttgatgaacagaaactaggctggattccagatactacttgtccctttggctgtaagaccctggcagcaagtgacctgcccgaccacacagagtatgcccccaacataatttctccttgtggctctcagggtatgactgattctagggagagtagaaattgagagtaaaatacccagattaagagtatttggcccctctggagccaaatgcctagatttatggcattgctatttattcgctatgaaatccaggacaaattattaatatctctgtgcctcagttctttcatccataaaatgaagagattaacaatgagagaattaacaatctcataggattgtttacaaattaaatgagggaaaaagctcaaagaatattttcagagtaccttatttcttagctgcagaaaagcacataacataaaacctgtgctcattaatggtttctaccaataaattctttgtttttttttttttttttttttttgagagagggtcttgctctgctgcccaggctggagtgcagtggcacaatcatgactcactaaagccttgacctcctgggctcaagcgatcctcccacctcagcctcccaagtagctgggaccacaggtgtgcaccacaatgtccagctaatttttttactttttgtagagacgaggtcatgctatgttgcccgagccagtctcaaactcctgagctcaagtgatcctcctgcctcagcctcccaaagtgctgggattacaggtgtgagccaccacactcagctgatgaattctttagtagaggttttttaacctctactttaacctcgcctttaacctctgaaatacctgttattctctcttggtttcccatacttaatttgaggcttttgcaatagtatttaagattacagtggtccttcctatccatagttttgctttctgtggtttcagttacctgaagtcaactatggcccaaaaataggtgagtacagtgcagtaagatattctgagagagagagagagaccatgtttatagaacttttgttacagtattttatcattattctattttattataagttattgttgttagtctcttactgtgcctaatttataaattaagctttatcataagtatgtaggtaaaggaaaaacatagtatatttagggttcagtaatatctgaggtttaagtcattcactgggggacttggaaggtatctgctgtggataaggggggactactgtacatagatgactgctttttttgatagtaaaatatgtaacataaaatttaccattttaaccattttttaagtggttacattcagtaagtacatttacattgttgtgcagccatcaccactatccatcatcagaattttttatgtacccattaagtaataattccccattccccctcccagcccctgataaccacgttatctctatgaatttgactatatggactggtttctaaaaggtataagaccttgcaaaatttggctgtgtagagtggctcatgcctgtaatcctagcactctgggaggccaaagtgggaggactgcttgaggccaagagttcaagaccaacctggccaacagagtgatctctaaagagaaaaaaaaaaaatctaaaaaaaaaaaaaaagaccttgcaaaatttactttaacagtagggccttaaaaagactatcatagagacagagaaaatttaataaaaaatcatgactctgcaagatttatgcaactataaattagataatgtcactgaaattaacaagctataggaagcacaataataacaacaaaaatggtgatatttaactaaatacatattagggaccttatgaagaacttggcacatgatgtttcattaaggtacttcacacatacctgtgaagaagctactgttgtatcagttgtgtgaccttggtccaaacacctaaacttctgtgcctatgctcagctataagaagggaaatgaaaacaggatgttaatcataggattactgtgaggaatcaatgagtgaatttatgcaatgcccttggcatagtacctggcattttagggagttctcaacagatgataatgacgacaattgtatccatttaacaggcgaggaagctgaggcttggtgaggtcaagaggcaggaacagtacctgaatccagctttcataccagagccagtattctaaatcttgtctctctgttgcttctaaagacaaaaataagcagatgggagtctaagatctcatggaaggagaaatgagggctccagagttaggggtaaaagacagacacagaaatggagattggactctgaagccaagggagctgcttgagggagtagagaacagagttgtgaacagtctagactccagaaccagcccaccagtactggaatacaggcatgtccaacttgctagtactttgtgctctaatgtctaatctataaactggatgtaataataatacctacttcataggaaggtcagtgaaagtgactaagtatacacaaaacatgtggaacagtttctggcagcttaaacaatcaatagaagttacacataaacccatgcagatgctttacatgaaacagtcagggagcccctcccttgctgctgtggaccaatgtctgtgtcccctcaaaattcttatgttgaagccctaatgtgatgttattgggaggtggggcctttaggaggtaattaggtcatgagggtgaagcctccataatgggattgctttccttgtaagaaaagcaagtaacctagctctttctctcttcctcccaggaagatacaagacaacagcttctgcgaaccagtaagagtggcctcattagacattggatttgccagtgacttgatcatggacttcccagtctccaggactgtgagttataaaggtttgttgtttaagccacccagcctatggtattgtttgttatagcagcacaaatggactaaggcactcacggagtctgcagcttcacatggcttgatgatggggaaacatgggctggattccagattccacttgacccttcagcagagagcctctgcacagtgaaaaatggagttcttgtagctctcagggtatgattctgattctatggagggtggaaacgagtaaaatacccagattaaaagcttagtattagttaattactgcttgatttattagtaaattattcttagttctcttacttcagatagaagaacccttactattgaaaagggaaacataaaaccttccaatcttagaagaaatacttatttatttatttttctgaaatggagtcttgcgctgtggcccaggctggagtgcagtggaatgatctcagcttactgcaacctcagccttccgggttcaaaagattatcctgcctcagcctccccagtagctggattatgggcacccgccaccattcctggctaattttttttgtttcttttgtttttttagtacagatgaggtttcactattttggccaggctggtctcgacctcctgacctcaagtgatccacccgccttggcctcccaaagtgctgggattataggcgtaagccaccacacccagcctgaaatactcttttagaatttgtaattcactttgttctaactctatatttgcccagcaacctctgctcagtaagaatgttttgcaggggatatatttccatcgcctcgggaaaaaaaagagataatagcaaatcaaccatctgtcttgtgatgaatgtttattcagctttatatcccaagtacctaaaacagttcctgtacaaagtaattgcccagcagaaatgactgaacccaccatcagacatggagaggcatataggaagactagactagttggtctaagtctccctgagactgactccagttgggaagatttggagagcaagggttttatttccaaatttttcctctaggtctttcaccatatttgctgtccttgggcaagatcagagtcatctttggaaggaaaagcatctctggattttgttaaataccatcttaggaaagtactctctgctcttcaaagtcagcgacgacatgagtcactgttacagaacccacagaatgtgtcccttaaaatactgagaatgaacactattttactgcctgcataattagcactagacaggtgaatttattactacttcattaaatagatgagtttattaactcagtgaagacttgtgggaaccttactaaaagagatgcaattccccagcctcaagatgctcacagtctagtgatgaggaagctggcaattccactatacatggctaaatgccagagtagtgcacagcatcctttagcggcatgaggaatgggctcataagcccacagtggaatgcaggggttctacacaaacgtagcttaatctgagccctggagggtgactgagctctattagccagagaatccaaatcactataaaactcccagagaacaaatgtcatgatgtgaagacaaataacaggcagaaagagatgggcaggaaggcagaattcaaaccatgatgacgttcaagtcacaaaattatctgcaagtcagcaggagaacactgaaggacttctggaaaggagagtaaaaagattcctttcatgttagaaacagattaccctctcaaacgggaggaggcttgagggggaggaggctagggccagagagactattaggagagccacactaagaaactctttcttctttattcaaatgtcaccacctcagagtctctctctagccatcctgtagataatttcggtctcctaactgcaccccaacacttcctatccctcatctctgcttacttcttttctctaagcccttattcctctctaacatccttctaggtatttacttacttatattcattacacttgtctaatgtggagtttcgttacctgctccatccccaacacctactaagttgctacaagcatttggaaggaacccaaagatttgcagaatgactactttaatgactcagtgaatagttgatagatacaccatgtggatcagggcctcattatttatcacctgaaccattcattcaacatatgattgttgaagggtctactctgtgccagccaagggtcctagatgtgaaatatacagcagtgaacaaagaccttgatctcacaaagatgatattataatgggctacgagggcatagcaaacccccaatatatagcgagagacacttttaagaacaatagggcagggtaaagaaataaagagatgaaaggaggggctgtcacagaataagtttttgtcatgaaagatttctcttatatttgaacagagacctcaaatataggaagagaaagccatgtagagatctgatatctgaaggcatgtaattcagccctgaagaacatagaaaatttttttttgttaaaaagccataggtctggtatttagcaaagacatggaatcaacctaaatgcccgtcgatagcagtctggataaagaaaatgtggtgcatatacaccatggaatactaggcggccataaaaaagatgtcctggctgggcgcggtggctcatgcctgtaatcccagcactttgggagagtgaggcaggcggatcacctgaggttaggagttcgagaacagcctaaccaacatggagaaaccctgtctctacttaaaaaaaaaaatacaaaattagccaggcatgatggcgaatgcctgtaatcccagctactcaggaggatgaggcaggagaattgcttgaacctgggaggtcaagcttgtggtgagccaagatcgcaccattgcactccagtctgggcaacaagagcgaaactctgtctcaaaaaaaaaaaaaaaaaaaagatgtcctttgcaggaagatggatggagctggaggacattattcttagtaaactaatacaggaacagaaaaccaaataccgcatgttctaactcatcagtgggagctaaatgatgagaatacatggacacacagaggggaacaacagacactggggtctccatcagagggtggagggtgggaggagggagaggaccagaaaaaataactcatgggtactaggcttaatacctgggtgacaaaataatctgtacaacaaacccccatgacacaagtttacctgtataacaaacctgcacgtgtacttctgcagttacagaagatcaaggatgggactaagaacctatttctaccaatatcccaggtgatgctaatgctgctggtccctaaattacaatttgatagcatcagttaaaacagctctctagatattttcagacagactaacacttgaggttttcacctccaatttttctactaaccccaatatactatcctattgcctaagggcaaaaagaactaaagaaggtaaaaacaaactgcaagcttctctttctctctgatactaacaaacaggaatgaaggtttgttaggatcaggagtgccaagatcaactctatgctcctaacattaaccacgaaaaaacccaggccactcataaaatactccctataatgacagcaactgacatttagagcaactgactggctgcctaccaaggcactgtttacataaattcttcacatgtagtatctcatttgattttcataacgatgatagagattgagaaaataattatgcccattttacagacaaggaaatagaggcacacagaagtaacttgttcatgtttaacaagtggtcaacagaaaagtcaggattttcacccagtgccttatctactagaacactggctgcgccaggcaatgaacccaggcaatctgacacctgtgcccatgttcttaaccgctcgacagtggttctcaaaccctggtatgcatccatatcaaaaggcctgaggttccatgtgctgccttgatacctttgagactcacagggccctgaaggcctagccatgagctcccggctctctccagatatgccctctcagtgggaaaggatccctgcccgcctagttcctcgtgtgttaaccatgttttatgtactggctatttgatatctgctattcctaatctctccctaagtctgctgaatcacagggccagactaacaaccaaaattatgtgcatcttccctgcaagcagctttcaccggtgggagaaagacatattacaaaagcataggccccagttcctttctctgtctgcttcctgacccttgcctgtagtgggcttcatgtggtctggtgtggtgtgatgtaccagtggaactctaagtattaaaatactattcattggcattaatctctccatgttgtcactcagccgcttttataaaattaagacttaggcacaattcatcctatttagccagaccacctgtaccccaccaggtcctccacataacaggttttgcctccctgccagcctgtagaattatccaaatggtcaattaaatcttcttgcaggaaccaagggtcaccctgctaccctcctgtcactacaaaatcaacctaccatggcccctgttggttcaatctattctcaagtgcaagtcccctgggctgtgaatatgtgactaataaactgctaccaacctcttctgcataggctgactgtagggtttgtgtgttcagccacctcctgccagttcaagtgatgtcttagtccatttttgctgctataacaaaataccacagttataaagaacagaaatttctcacagttctgaaggatgggaagtctaagatcaaggctccagcaggttgtgggtctggtaagggcctttttgctgtgttctcacgtggcagaagggtaggggaaaagggggatggaggaatgctgtgtcttcatagtcttcatatggcagaagaacaagggaggtgaactctctctctgaagcctcttttataagagcattaactccttcatgccctcatgacttaatcacttcccaaaggcctcacctcttaataacaccacaatggggattaagtttcaatgtttgggggacactcagacagcagcaggtgggggaatccctccttcaccaatggggtgaataggtgaccagaacccccgaattactaataaagaacacagaagttcaagctcatagaagtagtgtagggcctgggtcttatgattctgatgtgaccacagttcaagaaccactgcattattctacactgcctcttaaagagttgacggaactgtccaagggcacccaggaaaccaggggcatggctctgcctggcactcaggcctactgattatcagctccctgctcctctccagtataagatgcccctagagctctctataagaggaaagggctgcagaatgactggtaatgcctctggaggcaaattctcagaatgaaaggggaggcttcccttagatcagtgctgtccaacagaaatataatgcaggcaagctattcgtgtaatttaaatttttctcatagctacactgaaaaaggtaagatgaagcaagtgaacttaatttcaacaatatattttctttaacccaacatatccaaagtattatcccctcaacttgtaatcagtataagaattattgagggattttactttctttttttcatactagatctttgaaatctgttgtgccttaccattataacatatctcaattcagactagttacgtttcaggtgctcaataatcacatgcggctaatggctacactattggatagtgcaggtttagacctttttattaaggcaatatagactatataatcatctcacagggacttgctaagttcaaaagacagcaaattagttgtaggtttcaacaatcactatcatagaaactatgcacatttgtttaaatatgtaacagaattaaagtatccatagaaaaagtggaaagtggggaagaaaagaatacttaaaaatatacctttgaggctgggcacggtggctcacgcatgtaatcccagcactttgggaggcccaggcgggtggatcacgaggtcaggaattcaagaccagcctagccaagatggtgaaaccccgtctctattaaaaatacaaaaaaattagctgggtgtggtggcgggtgcctgtaatcccagctactcgggaggctgaggcagagaattgcttgaccctgggaggcagaggttgcagtgagctgagatcgtaccattgcattccagcctgggcaacagagtaagactctgtctcaaaaaaaaaaaatgtatacatatatatatatacctttgctccttcaataacttgttgcatttttcaacttatctgtagaagatgaaggccagctttagtctataatacacagaggacttactacatgcgaggcactatttcaaacatgttacctatctcttttagtcttcacagaaactttacgaggtagttattaatatcatccctacttaacgggtaagaaaactgaggcacagaaaggtcaagtaacttgcccaaggttattcagtcactgagtgttccaacctagctgctgaggtttgattctggctctgccccgctgattgtgccaccagttcatctgtacagttaacttgtgtgtgtttgttttttcatctttaaaatcagaataaaatagaactgtcataaagaacaaataagctagtgcatggaaagcactagaaattctccaagtcataagaaacacccaacaaatgtcagcagtcctcatcagaatctccatgtgataaatattaaacctggccaggcatggtggctcatgcctataatcccagcactttgagaggcggaggcgggcagatcacttgaggtcaggagttcaagactaacctgaccaacatgccaaaaccccgtctctactaaaaatacaaaaattagctgggcatggtggtgcacgcctgtaatcccagctactggggaggctgaggcaggagaattgctgaaacccaggaggcggaggttgcagtgagccaagatcgcgccactgcactccagcctgggtgacagagcaagactttgtctcaaaaaacaaacaaaccaaaaaacccaaaaaactgaaccttaatagtggtctgatttgtctttaagggagtttgttttagatcttgacaatattatccacaattgttcatcaacttttgaataccctgaaaaagttgatggattctacagcccaccaaacgtgagataacagacaaggactgtggataatccttctattttgttctctaattgcaagctgtagcacccaaaatccagatgcctgttggagagctacatgaatcacttactcactgaataactcctctttgcaaacctcttgctgggtactcttgagaagaatatgataatgtccatgaaacagaggtccctgaagtctaatgggagagagataggaaaccaagagttatatgccagtggcaagtgcaactccaaaaaagcaaagaaaatcaatcatctttcttttcctaattgcaactctttctagctttctcacataagtagcattctcctagctgccaggagtgaaaaacctcagagttactgttaatatctattatgggctgaattgtgtgtgcctctctcaaaacgttaaagtcctaacgctcggtatctcagaaataactgtctttggaaatagggcctttaaagaggtgatgaagttgacttacagcaagggagctcacgcacacagaggggagaggccttacaagccaccaaaactggtgacaccttgattttggacttttagcctccagaactgtaacaaatacatttctgtataatccagccaatttgtagtattttcttatggcagccctggcaaatgaatataattgcccctcccttggccttcatatataaacgattagtgaggcctagcatggtggctcacacctggaatcccaatactttgggaggctgaggtgggcggatcacttgaggtcgagtttgagaccagcctggccaacatggagaaacccagtctttactataaacacaaaaattagcagggcgtggtgacgggcacctgtaaagccagaggcaggagaattgcttgaacccaggaggcagaggttgcagtgagctgagatcgtaccactgcactccagcctgggcaacagagcaagattccatctcaaaaaaaacaaaaaacaaaaaacacaattaatgataattattagtttttaagccttactgactcatcatctgggtttgttttaaaatactcaagggaaaaaaagttggtgggagaggcaataagattagcaagaatggaagcagggtgactgtacataagagttcattatatttgggtatgtttggatatttccatagtaaaaaataagggaataacaacccactatgaatagtgtgataacaatttcataaaacacagacaaaaacacattaaaaactgctaaacagaaatgcattaaaatgttaataattatctatatcctagtattaaggaaatttgtaatattttatatttctgtattttctacatcctgtacagagaacgtgcatctctatgatcaaaatatgaactactaatattgcttaaaattaaatgagaattctttcaaaattttctaaagtctaaactcaaccttgctttcaaaatcttctacagtaaaattccaacctccctccccaacttgatctcaaatggctcctctgcagccagtttcctatgattatttatatggatcatttatctattttatttcctaattctaaattgggatttcaaactgtgagaccaagggtattcagatgtaaggaacccaagtctaggacacaaatcccactgttcttactagcactgtgatataggaaagtaaattaggctctctccatttcctcatctgtataattggtgtaataacagtacccatatcacaatacccacatcacctttgtaaggtgaacagaacccacaacacaaggcctttgtgaaggttcagtgtgttagtttttataaagccctcagagtgatactcagcacccaatgtttaactagtgtgactaatattcatgtcacattttctccaattatacaataacggaacacttctgtagcagaaacatttgcaaggaatgaaataccttctcgcactcggaacagaagaggaaggtgaatgctaggtcctgtcacagtggggctctgctgccagaagccaggatgctctccttcctcctctcccgcagcattctttcagaagtcagggcaggggaaggaaaggaggctgggagattgcacgatcttgtctgagatcctggaaaatccacagaggataactccagacgccacctgttgagtgatgcactctttcttaaaaaacgggtcaggcatagtccaagaacagcctcctttcctgcaggaatcagaaagaagagccaggcgcttgctgaaaaatgaatattttttattatgatagttttaatattaacggccgacatgttgccacattcctgtactattccatacacattttacttgtactatattactaattgtcaaaacaaatatataaggttaatatttccttttgcagaagaggaaactaagaccagaaactaagcaccgaaagattaagttctcacccaacgttacaccgctaggaagctacagagctgtgggaggtgggggaaggcgggtcgggccgctgagagcccaggagatcctcagacgcctccccattcaggtccacttccaaccaggggactcccgaaccgccccgaacgcagcagctccggatacagtaaggcaatcagctgcccagccattcaactccgccctccgctgctcgccgcagcgtcttttcctgctgaccgaagtgcgagccctgctgatcctacgaccaaaccataaaagttaaaacaggtcgcggggtcccaggactcactcacttccacgagaggaatgaaggccgcgctctcaacctcttgccgcggaagtgcccgggagagcagggagctctggaactacatttcccagcatccccgggaggaacggaagccgctgccccgccccctgggcggaagtgcgggcttcgactcccacggccgaatcttatttctcagaatccccaaggggagcgggcttcgtgttctcgtcctcaaatagtcgaagtaccaccgaacccactgagcactggggtataggttcctatttccccaggggagcaaataacaaagccgcgctttcccagagctgaagtgcccccaaaagtctggaccacacgtcccagaatcctctgtagggctgagcttcccgccagcctgcaattttccttttgaattagcggggggagtctaagtcattgcttgtagagctcagcctgctttttccttttgccattgttcccttttatacgtgacagaagttgcgaatatgaaaaaaaaaaaggaaaatacaaaggaatgctatgtgtgagctaaaaacagaggtaataaaagaggtggccagagccgcccagagcaacaagccttttataatatgggtatggattcatctgtgattaaaaatgctcaaaaaaggagatgcaatcatccagcaggacatgaaacaaaagcagcaaaattctccacttttcttgcgcttagttttctttcattcgcaggatactgaagaaagtattatagtattgaataggctctatcctatataaaatcttgaaaacattcagttcagattaaggaatcacatcacttcttgctctcagaatcaggaatctgtaaaggtgtcttatgatttgccaaagtgtctatgaatattcagtaaggagagggaggtgaagtgagggattaagacatgaagtgcaaaaaatacagaaagctatactattcacttttctcctaggtagaaactaaatatttttccaagtttattatgaaagggtaaagaagaaaaaatggaagttgactacataggagtagctgtaaacatctgaacaatgttcaatttaggctgaggcaggagaccagcagggcgtgattccaagatcagataagaaacctgctgaaaccagcaagtgatggaaagcaacctgtaagttccctttgctacctatcagtataagacactcccaccagcgccgtgacggtttataaatgccatggcaacacctggaagttaccaaccccttttctagagatttccgagtaactcaccccttaatttgcatgtaatgaaaagttggtataaatatacccagccaacagcccatatgctgctactctgggcacactgcctgtgggctagtcttggtctgcaaggaacagtcactgagcttttaacactgttgattcgataaacctgctttcttccgctgctggcttgctgttgaattctttcctgagcaaagccaagaaactgccctgcatcaatgccatttcaaaatctggataagtactctctctactttagtaagaggaagagagaaatgtaatcacccaatggactcatcttgcccactgcccagagagagccaatttatcaagacaggaattgcaatagagaaagagtttaatacacgtagagctggctaaatgggagaccagggtgaagactgaactctgccgttttttcttttcttactcaaattcctatctaagggtctggggagtcaagccctccaaaccataaagtctcatgagaggggttttaatttaaccctatataatgtgacttactttccaacctgtcataacacctcatgacggataagaaaggaaatcaaaatacttcaaccccaaatatgtttcattgccctatcatgaaatagccctgcaaagttgtcctttgtggagaaaaatctacattctgtagagaatctcctttcctttttccaggccattttttctgatccaggagagaatcaactaagagtctgacacttttttttttttttaagagttttgctcttgtcatccaggctggagtgcaattgtgcaatcttagctcaccacaacccccgcgtcctgggttcaagcgattctcctgcttcagcctcccaagtagctgggattacaggcatgcaccacaatgcccggctaattttgtatttttaacagagccagggtttctccatgttggtcaggctggtctcgaactcccaacctcaggtgacctgcctgcctcggcctcccaaaatactgggattacagccgtgagccaccgtgcctgggctacctttttaagtctgatgagaaaaatctacgatctcttatttctgaagactgatacctggaagcttcatctgcgtaataagaaccttggtctccacaatctcttatcctaacccagacatttcctttctattgattccaggactttagataaactctttcaaccaattgccaatcagaaaatctttgaatctgcctataacctggaagccccacacacttcacatacccctaccccccaccctgccctccactcccaaccccctctgcttccagttgtcacacctttctggactaaaccaacgtatgtcttgcatatattgcttgatgtcttatgtcccactgaaatgtctaaagcctagctgtggcctgaccaccttgggcatatgttctcagggtcttctgagggctgtgtcctgggccatggacgcttgcatttggctcagaataatctcttcaaatattttacagagtttgagtcttttcattgacagaagttttactgttactgaaatcagcctccctgaaaatttggaggctggggtttttaaaagataagtttggtgggcagggggctagggaatgggtgtgtttattggttggggatgcaattggttggggatgcaatcatggggtgtggacctcttctgggtggatgtcacatgactggtagagtcaagagttgtgggtctgggtggggtcgtctggtcatcaaaaatgcaaaagcctgaaaagacatagcaaaaggccaatcttaggttctgcaatagcgatgttatttatagggataattggggaagttgcaaatttgtgacctccagaataatgattggtaattatttatccctacatcttagcagaattcgggtctctctcataatcctaaacttgtggccttttattagtgctcttgtgagcaaaggctgctcctttcccaaacaatgcaaatctaaagacgactaccctgaacatgtttctcctataagtgtgtctatatgagatttaaatatgttactcaaattcagatttgagaaaatagccttacttaatccttggatgtcattggacattttacaaactcaatttcttttaacattattactactagaggtagtggtactgctaatgttttaaaatcaactttattaagtataatttctattaaaacataccccttttaaagtataaagttcagtacattcgatgaacgtgtacacttgtgtaaagccaccacactcaagatgcatatatttacctcacaccccaaaaagctctcgttagccctgctatgattgttctatcatgtccccagccccaagcactaatctgctttctgttatgaaaaattagttgttttcctgccgaagaatctcatacaaatgaaatcatataacatgtactctgatgtgtgaagcttttttgacacagcatttttttttttttagttggagtctcgctctgtcacccaggctggagtgcagtggcgccatctcggctcactgcaagctccgcctcccgggttcacgcaattctcctgcctcagctgcctgagtagctgggactacaggcgcccactaccacgtccggctaattttttgtatttttaatagcgacggggtttcaccgtgttaggtaggatggtctcagtctcctgacctcgtgatctgcctgcctcagcctcccaaagtgctgggattacaggcatgagccactgcacccagccgacacagcatgtttttaaaattcattcgggttgtactatttgttcttactgttgagtactcttcaatgatacggatatatcacaacttattaatccatttatttcttgataaacatttggaatgctttcaattttttgctactatgagcaaagctgatgtggacatttcacaacaacgatttgtgtaaacatatgtttttacttctgtagtttagattcctaatagtgaaagtgctggcttacattatattttatagcatcatgaaagcataaatgatgtgcagtacactgcccataaagtatataatttgatgagacttaacatatgtacacacttaagaaaccatgccacaatcaaggtaatggacatatccatcacactcaaaacttcccttgtgccactctgtaatttttttataggcttaactttatcagaaattgtcaaattgttttccaaaagcgttgtaatttttatatttccatcaaaatgtatgaagattccagcatctccaatcttcaccaacacttggtgttgtcagactttttaagtcattctgtgggtgtgtagtgcttacggtggtttttgtttgcattttacaggtgaccaaatattcatcacattttcatgtgctttttggccatttatgtattttgttaagtgtctgcttaaatcttgagcccatttttttaactgcgttagttgtcttattattcatgaattaagagttcttttatattttggataaaaaaccttttgtcagatatgtgtagtgagaatagtttcctccactctgggcatgtatttttatctctaacaaaatcttttgaagagcaggtttttatttttatgaagtccaatttatcaatttttttatagttagtttaaaaaaattatatctaataaatctttgttgactccaaagataagatttttctcctatgttttcttctagaagttttataagctttagcttttatatttaggcctgtcatccaagtaattactatttgtataggtgtttccaattcattttttttccaatttattttttaaaaagactcttcccttctttaaattacttgagacctttggtacaaaatcatttgaccatatatgtgtgtgggtttatttctgacttctggactccctatagtgttcttttgatttatatgtctaatttgatgccaatattatgctgttttgattgctgcagctttataaaaagtctagaagccaggcaacatccattctccaacttttttttttcaaggttattttggctattctagatgctttggattttcatatgaatttaacaatcagcttgtcaatttcctcaaataagcatgtgattttttttttcctgagacagagtctcactctgtcacccaggctggagtgcagtggcatgatctcagctcactgtaacccccacctcctgaattcaagcgattctctgcctcagtctcccaagtagctggggctacaggtgtgcaccagcacacccggctaatttttgtagagatggggttttgccatgttggccaggctagtcttgaactcctggcctccagtgatccatacttcttgaactcctatagtgctgggattacaggcatgaggcaccacacctggccagcctgctgaaattttaatcgggactgcattcaatttatagatcaatttggtaagaattgatgacttaacaatatcgtatcttccaatccctagtcatactatattgctccattcatttaggcctcttttaatttctcttggcaatattttatagctttcaatgtagatgtcatgaatgtctttgatcagatttacctttaaatagtcgtttttaaaataaacctcatacttaaaagctttagatttacagaaaaattgagcaggtagtagaggaagttcccatatatcctatacccaatttcccgttattaacttcttacgttagtatgttacatttgctagaattaatgaaccaatattgatacattattattaactaaagtccacggtttgttgagatttatttagttttaaactaatgtccttcttatgtgccagtatgccatccagaatgtcatgttatatttagtttatcatgtctccctaggctcctcttggttgtgatcgtttctcagactttccttgtttttgatgaccttgacagttttgaggagtgctggtcgggtgtcctgtagaatatccctcaaatggattttttcctcataatcaaattaaggttatggattttggggaagtaaagtgccatttttatcatgtcattcaagggtacatgatcaatataacctatcactcttgacgttgaccttgatcacgtagctgaggtagtgtttgttaggtttcctcaccctttttccccttttctcatattgtactctttggaaggaagtcactatgagtagcccacatggaggaaatagggaattatatcccatctccttgagggcagaatagctataaaaattatgtagaaatatttcatattttcaatgttactaatattataaataatggtttttatttttcatttctgattgtgtatttatctattttgttttttaggtttgatcagtttttgctttatgtatcttggagctctgtttttaggtgcatacacaattaggattgttaggtcttgttagtgaatggatcctctataattgtgtaatgtttcactttatccctggaagttttcattgacctaaagtctaaattgtctgataataatgtaaccacatcagccatacagtttttctttttattgtggtaaaatatgcatagcataaaatttactgttttaactgtttaagtgaacagtacagtagtgctaagtatgttcacaatgttgtgcaactatcactactgtccatctccaactttttcttcatcacatactgaagctccgtacccattaaacaataacttcacatcctctctctccctagccccgagtaattgctgttctaccttctgtttctgtgtatttgactatgctaagtacctcgcataagtgaaatcatacaatatttgtccttttatgtctgacttctttcacttaacataatgtctttaagcttcattcatgttatcacgtgtcagaatttaattccttaaggctgaataatattctgttgtatgtatatactacattttgtttattcatttatccacaaacatttgagttgttgccaccttctagatattgtgaataatgctgctatgaacattgctatacaaatatctgttcaagtgtctgctttcaatcattctgtgtatacacccagaagtggaactgttatatcaaatggtaattttatgttttttttttttgaggaactactatatggctttccacagtgacaacaccattttacatttccaccagaaatgcacaaagtttccaatttctccacatctgtgccaacacttgttgtatcagcaatcttttgattagtgctttcatggcacatatttttcatcactccattttcagtctctctatataattatatttaaagtgagtttcttatatatagcttatagttgggtcactttttttcgttgttgttgtttgtttgtttatttgtttttgagacggagtctggctctgtcgcccaggctggagtgcaatggcgcaatctcggctcactgcaagctccgcctcccgggttcatgccattctcctgcctc[211 bp omitted]caaacattgtctttatgtagttagacacttcacatttaatgtaattatttatatggtttgatttatacctaccaatttattatttttgtgtttgtctctttttgttcctatgttacctcctttctttcttcttttggattatttgaatttttttaatgctctatttttatttgctttttttttttttttgagacaagagtctcactctgttgcccaggctgtacatgttatttttaaactacatgactttggttttatcttttgttttgtttgatttagtgttgctttagaaacccatgtatacatacctaacatattgtggactattttgagccaatagtttatggcttcacataaaacaaggaaaacttacaactattgagatctgtttatcctcccctctttgtgctatagtgtgtgtattatatctacatgctctgaaaaatcccaccaatactttaaatttttatattcaaccatcatatatattttaaagaatttaaaagggggggaaatattgtattatgtgtaccaagtttactagttctgtttctctgccttcattcctgaaactttcctctgatattatttctcttcagcatttcttttaaagtatatctgctagtgatgaattctcttagttttcttttgtctgagaaggtccttattttatttccatttctggaggatattttccttgaatatagtgtctggattgacaattctttactttcagcacattaaaatgctgttttactgtcttctgacatccagggtttctgataagaaatttgcattcatttgaaatgttgttgccctatttgcaatgtataatttttctttaaacgctttcaaacatttttttctttatctttgatattttaatagtttcattatgatgtgctggggtatggttttcttcatttttaacatatttaggttttgctgagttttttttcaatctgcagatgtatttcttttattaaattggtgaagtattcgactataatttatttgaaaagtttcctatttcaatacctttctcctcctcttctggaattccaatcatgggaatgttagatcttttaatgttgtcccaaatgtccttagggctcaattcagtttttctatttttgctttttctcctccagattcgatattttatactgttcagtttttaagctcaatgagttgcctttgtcatctccattctgctactgactgattttaaatttcagttattgtattttgaagttctgaaatttccatttgcttgcttttatagtttctagttttctgacaacttttatatttccatttatttcaaatgcttacctatacctcatggagaatgattacaataacttttaaaagtctctgataatgcaaaaatctagaacattcaggggttggaatctcttgaatggcttttttcttgaagttggtcagatatacctgtttttctttttacatgtcaagtaattttggattgtatcctgagcattttcaatatgttaccagattctggtcctattaaaatctatagagaacattgagggttttttttttgtttgttttagcaggcagccaaccaggttaatttccttttttttttttttttttttttttttttttttcagatggagccttgctttgtcacccaggctggagtgtagtggcgtgatctcagctcactgcagcctctgcctcctgggttcaagcaattcttctgcctcagcctctcaaataggtgggatcacaggcacatgccaccacacctggctaatttttgtatttttagtagagatggggtttcaccatgttggc[132 bp omitted]tgttagttctaaaaactttgctgtgctatttgggtatgccactcagtgcgccactcagggattagctgatttctgagcaatggtttataacatagttcagttctcaatgtattttctatgttcctttgggtgtgttatttgaatgtgcagcttagtgatgagcctttaaattgtgtcagttcatccacaaaactgaggtatccccttctccagctctgtcttctgaatcttctctcacactctctggattctaagggctttcttcccaagatcctttgacccaaaagatgagattctctcagagttttagcctcccaccctgtcacccttggcttactctggtgagagaaaagagaagtatatgataactatccctccccacattttgaacaacagaaacctcttttttttcagtttctctatgtagacacatacattttcactcaggattttacatgcccatatgcactaatattagtgcagttccaccatcagtgctggcattgggaagggccaggaaaaaaaaaagagatgaaagggagtttcccccgtacattctgactcacagaggccctctttctagttttctggccagaaagatgagtttcttttagaattgtttcaagaggaatgcttcctggatttgcccatttggtatgatgttggctgtgggtttgtcataggtggctcttattattttgtttcttcaatagctagtttgacagtttttaacttgaagcagtgttattttattaaaagccttttctgcatctattgagataattttgtggtttttgtctttagttctgttatgttaatgaatcacatttattgatttgcgtatgttgaaccaaacttccatcccaggaataaatcctgcttgattctgatggataagctttttgatgtgctgctagatttggtttgccagtattttgttgaggatttttgcattgatagtcatcaagggtattggcctgaagttttccttttttgttgtgtctctactaggttgtggtatcaggaggatgctggtcttatagaatgagttagggaagagtccctcctcctgtttcttgaaatagtttcagtaggaatgctaccagctcttctttgtgcatctggtagaatctttggctatgaatctgttggtccagggcttttattttggtaggctatttattactgattcaattttgaagcttgttattggtctgttcagggattcagttttttcctggttcggtcttgggaggatgtatatgtccaggaatttatgcatttcttctagattttctattttatatgcatagaatattcataatattctctgatgattatttgtatttctgtgaggtcagtggtaatattctccttgtcatttctgattctgtttatttgaatcttctcccttttcttctttatgagcccagctaacaatcttttttttttttttttttttttttttttttaaaaaaccacctcctggattcgttgatattttgaatgatttcttatgtctcagtctccttcagtcatctctgattctggttatttttgtcttctgctagctttgggtttggtttgtgtttggttctttagttcttttagttgtgaccttaggctgtcaaattgagatctttgtaacttcttgatgtgggtgtttagtgctataaatttccctcttaacactgccttagctgtgtcccagggattctggtatgttgtgtgtttgttctcattagtttcaaagaacttctttatttttgctttaactttattatttacccaaaagtcattcaggagcaggttaattttcatgtaattgcatggttttcagcaattttttaaagtcttgatgtctatttttactgtgtgatggtccaagagtgtgtttggtatgagttccattaatttgcatttgctaaggattgtcgtatgtctgattgtgtggttaattttagagtatgtgccacgtggctatgagaagaatgtatattctcttgttttggggtggagagttctgtacaggtctattatatccatttggtccaattttgagtttaggtcctgaacatatctgttaattttctacctcaataaagtttgtaatactgtcagtagggtgttgtagtctcccactattattgtgtgggagcctaagtctctttgaaggtctctaagaacttgctttatgaatctgggtactcctgtgttgggtgcatatatgtttagcatagttaggtcttcttgttgaattgaactctttaccattatgtaatgcatttctttgtcatttttgattttttttttggtttaaagtctgttttgtctgaaattaggattgcaacctctactttttcctgttttccatttgcttggtagatttctcttcatccttttattttgatccgtgggtgtcactgcatgttagatgggtctcttgaggacagcataccaatgggtcttggttctttatccagattgccactctgtgccttttaattggagaatttagcccattacattcaaggttagtattgatatgtttggatttgatcctgtcatcatgatgttagctggttattatgcagacttgtttgtgtggttgctttatagtgtcactggtctgtgtacttctgtgtgtttttgcagtggctggtaatattatttcctttccatattttgtgcttccttcaggaactcttgtaaggcagatctggtggtagcaaattccctcagcatttgcttttctgaaaaggatcttatttctccttcacttatgaagcttagtttggccagatttgaaatcctggcttggaatttcttttctttaagaatgctgaatattgactccccatctcttttggcttgtaagctttctgctgaggttcactgttagtttgatgggcttccctttgtaggtaacctgtcctttttctctagctgcctttaacattttttttctttcatttcgaccgtggagaatcttttggttatgtgtcttgtgggtgatcttcttgtggaagtatcttccagtggttctctgcattccctgaatttaaatgttgacctctctagctaggtggagaatttgtcgtgggtgatatcatgaagtatgtggtctaagattctccacatctctttcaggaacaccaatgggttgtagatttggtctctttacataaccccatatttcttggaggttttgttcattccttttcattaatttttctctatttttgtctgactgttttacttcagaaagccagtcttcaagctccaagatttttttcttcagcttggtctattctgctattaatacttgagattgcactatgaaattcttgtagtatatttttcagctctatcaggttggccacattcttttctgtagtggctattttgtctgtcagctcctgtatcattttattgtgattcttagcttctttggattgggtttcaatgtactcctgcatctcaatgatcttcattcctatccatatcccaaattctatttccatcatttcagccatctcagctctgttcagacccttcctgaagagctagcatggttatttggaagaaagaagttactctggctttttgaattgacaagagttcttgagctggttatttctcatcttcatgggatgatgttcttcaatctttgaacttgctttcctttggattatttttttccttttattctatttgatatccttgagggtttgatgtggtataaggtgagttcagctgactggcttcatttaaggaagattttagggggccaatgctcagctctcaactcctggactgcatgttgtaactctggtgggcttatatcgggccctgactttgttctctggattctcgaggttgggaacgaactacactggggtggccaaggtgttcccaggctgctggtcactgcactacaatggatggtgccaaagcattttttagtgcagtggcagcaggatttgtcatcattctcacatgccagctgcagtggcagtggcaacatggtggggtgcatgctcatcagctgtggcagcttgctagtgggtaccgggatgcctgcttctgtgtgagcacttacagcagtggtggaggcagcatggctcaagggggcaggggggccccccactggtgactgtatgtgtagtagtgctggtggtggtgttagcatggggatgaggcactggcttctgcaggtctgtgtgtgtcccctgtgcatgttcatatgttatttaacctacactccatatttaaatttattctgtttttaatttaaattccttgtaattgatttgcctccagtttagcccacttttatgaattgtttttaactgtcacgtttctcctgtctccattaatctggcatgattcttcagctttctctttttgctcatggtgtttttgatactattttaatgtatggatatactgcattttctatatcaatagtaatcaaaagtaatgccatttttaatagccacacataaagtcaaatacctaggaattaaccaaaaaagttaaagttgtctataataaaaactataaaacactgacaaaaaaattgaagaggacaccaaaaaatggaaaaatgttccatgtttatggattggaagaatcagtaacgttaaaatatccatactacccaagcaatctacagattcagtgcaatctctgttaaaaataccaatgacattcttcagagaaattaaaaagcctcaaatttatatggaaccacaaaaaaacccagaataattgaggctatcctgaccaaaaagaacaaaaccgacttcaaattatactacagagctataataaccaaaacagcatagtactggcataaaaacagacacagagaccaatggaacagaacagagaacagaaacaaatccacacacctacggataactaatttttgacaaatgtgctgagaacacatgaggaaaagacagtctcttcaataaatgatgctgggaaaactggatatccatatgcagaagaatgaaactagacctctatttcttaccacataaaaaagcaaatcagaatggattaaaaacttaaatctaagacctcaatctataaaactaataaaagaaaactttgggccaggcgcggtggctcacacctgtaatcctagcactttgggaggctgaagtgggtggatcacggggtcaggagatcaagaccatcctagctaacacggtgaaaacctgtctctactaaaaatacaaaaaattagcctggcgtggtggcaggtgcctgtagtcccagctacttggaaggctgaggcaggagaatggtatgaacccaggaggcagagtttgcagtgagccgagatcatgccactgcactccagcctgggtgaaagagcgagactccacctcaaaaaaaaaaaaaaaaagaaattttcaagaaaaaagaattattttacaaatgtataaacaatatttgaaaaatgagggaaaaggccaaaaagccattagtacagtaggcaaaaggtttgaacaatttaccaataataataataataataataatcatggcctttgaaaatatgaaaagatgttctatttcatttacaatacaggaaatgtaaattaaaattacatcggcatactatcagttttagcctcacatcatcaggttatactaaacattttcctcttttcagttctctactgatcctcaagcagtaatttcttgtcagttccttgaagattttatctccacctttgttcactctccagtaatacttctgtaataattggggatatttcaatcaggaaatcattgtttatgtaatatttttgcttgaagactcaagagaaaggtaaggacgacactcagtgcaggagtccatattaccacataggcgtttcggatgggggattcccttctccggggacttggaagaagtgtggtcaagaagctatgtgtagttgcaacacttccccctggagggtaaaactgtgaacgtttactccttgggcattctgggaagtgtcccaacggtcggtggggttgcgggcacttccggtcaggcaggcggatccggggaattctgggaaatgtagtccagacgctctgtggagtcgcgggagctacggctgcgggagttaccctttattctgtgatattttgagctgttctgcgtctcgcaggcccttctgaatttcctggacctactctcggaaccctcaacgagctagcgatagatttagaggaaaggaagcaccgtcggaaagcaaaggtttggaagggtgagggcggcggtttgcgatccccgcggcagagccttcttgcgtttagggctgtcctagcatcccgagggactcggtcctgtcacgtttcgccctatttgggggtttctggggctctcagctcgcccaatccgcatccctccactactggcgcggggccgattcccccggtacaacgttggggtgttacttaatctccctgggactctttttgcttttctttaaatgggggatattaagaccttcctaatagaattgtcttgggaattgaaagaggtaatataaaagagtcttaaaacagtttttgttatagtgaatggcgatctcttgttaatttcctgagaaatggtcaggtccctgggctggtgtcagagctccagctggctcttctctctgatccctgcagaacgctggaaaattctggacagtctttgacc[367 bp omitted]ttccacagaaggaggggagggtcttgaccgttttgtcaagagtggtgacacaaccatggtattttgtagcattgtttccgcatcctgacttctctaaaaggattgcttggaggtagacggagtgactccttgactactgacaacaaagctccacgcgagtgtgacttgtcatttttcttttacagtaacgttcacatctattgtaggatgctgtaatcgggcatgggcattgataagaaagtcttaattgctatcttcaattctaagggctttatacaaagaaattcacgtacaccacatggtagctctgtggagaggtactgccatttcgtctattaaagatgagagtgaaacaaagggagcaggagttatttgcccatagttgcccaagtaataagaagtggagccggggttggaacctttgcggtccaggtcagagcccaagctgataatttctgggatacattctcactgaggcagaggaactagctggaatcaggtggggaaagcaagttaggacttgattggagggaccttgagagcaaggctcatgggcttggacctctctaggactcttttaaaactttgtcaactattttttttcacttattacacatattttgtattcttatagaaccatatcattatggagcattcagaaattgcagaaatacgacaagaaaaaaagcttaattacctctgaatgcaggatataaagatagtaaccattaagcttatttttatttatttaattcattttaaaattttctgagacagagtctcactctcatgcccaggatggagtgcagtggcatgacctcagctcactgcaacctccacttcccgggttcaagcgattttcctcccttagcctcccaagtagctgggattataggcacacaccaccccatcttttagtaaagacgagttttcaccgtgttggccaggctagtctcgaactcctgaccttaggtgatctgcccacctcagcctcccaaagtgcagggattacaggtgtgagccactgtgcccagtcattaagctttttttttttttttaatgcttattgccttattacaaaggatattacaaaagctacaggtgaagagatgcatagggcaaggcatgtgggaagggatgcagagcttccataccttcctgggtatgccactctccaggaacctccatgcattcagcaatccagaagctctcagaatccagtcctcttggttttttatggaaacttcattgcatagacacgattgattaaaccattggccactggtgatcagcttaacctttagcccttctcccttcccagaggttggggagtggggctgaaagtcccatgcctttactctctaaccatgcattggtctttcaggtgaccagccacatcctgaaactacctaggggttgccagccatcactcaattcatgagtatacaaaagatcaatttggagattctaaggattttagttgtatgccaggagacatgttagtgaccaaatatgcatttaggttatcaccgtacatacccatctttgaacccagatcctcttacataaaaaggatttacaactcagccaggcgtggtggctcacacctgtaatcccagcacttttgggaggctgaggtgggtggatcacctgaggtcaggagttcgagaccagcctggctaacatggggaaaccccatctctacaaaaaatagaaaattagccaggtatggtggcacatgcctgtagtcccagctactcgggaggctgagacaggagaaacacctgaacctgggaggcaaaggctgcagtgagcaaagattgccccactgtactccagcctgggcgagacagagtgagactccgtctcaaaaaaaaaaaaaaaaaaaaaaggatatgcaactcaaaagataccaccacattatcagaatcccatttagtcacattaataagtccagtccagtgggtgaagccactcaggtttgctggcttccatttgatatacggttctaaaagtaggagtggtcttagcaaaacatatagcttcaccatttcaggcatctggtgtaattgagctaagagacagtgtcatcttaaggtattaatatactactggagttctctcaattcataactcatttattcattcctttaccctcagctaccgtttctccttctttccattaatacacagactttttcacctttggaagggacattagaatcaccactgtgccggtctagactgcagacagcaatactagtctagcaaatgcttccccctcagttcacctccattcagatagggtaaggttacttaggtgcagaatagtggactgtttttaccatcaggaaatacagttatattcactgttagcccaattttgccagatggggtgaaggcacaacccatccccatcgggccctcaggaattctgacacaagttttagaaatttagttatggtttcttgcttaggaatcatccctgcttccaacacttgtagttgtagccctgatcctgtgaccactacatcaggtatggggaaaaaaattgaggtaatatggggaagaaggaaaaaaaaaagtgtaatcattatactggtgttctcctcccttggcaagaattgcatagtcatcccagcctcctttcccaccaggtcttccccagatcaaccagaaaaatagagaaattgctatcccactgacattgggtatgagcacacacttgcgaaggtgtgtaagccagccctgatgcttttatctctttgttttagacaatcaatgttttaattgcctgttccacttccctatcaaactattactctgaggaggatcgctctctattcattgctggacattgtgggctctatatctagtgtgtttcttggtcttctttcttctttttttttaaaaacactctgaacatttggatcttccaccatataagcaaaacccggtcaagaatcagtgtctactgctgtcaagacccatctgtagcctcccagggctaccagcatcacttgccagctacactcaggtccttcccaccagggaatctgtttcacagccatcttcactgtgtcatttttgctgacaaacagaacagttttcatctgcattttgtgcctcagagggtgcaagaacatgtctcgatttagcccatctttgcactgctgcactactcccatatccactaatttcacggacccaggcagccactgcaagggagcacatggggatatctgcttgttgattcaaaacctgaagggggctctgccaatgagcatcaacaggtcctactttaatgcacaccccctacttcaaatttctgtaagttcatgcctcacatgggcatcccctttaatagaccagatctccactgctcttctgcctgagtgtatggccaggccatttgccactgcccatgagtcagtaaagatcccaaagtgggtttctaccaccattcagtttttcatcactgctaggaaaacagcgtgtaattcagtgcattgagctgatatgtttttaccttctttgatcagggtggcatccttccaaatcatatgttcattcactttggaactgccattcacaaaatgagcagctctttgctggtcagttgagagttgtttatagcttctcacacagttccagagtcagtctccaggtagcatgactctgtataaactatttccattttattatggaactcttctgggcactgccatccccattagaatgttttcctaacattacctaagagagcataggtatttcaggtgtcaagatttttaatgtctttcagtcatagggctagcctcagttaatgccccatagtggggtagtaaatactcttcaagtcaaaattttctagtccaaagtctcagtaattgtcactagaaggcactcacaggcttctgtcataagccccagcctacattccacatggagctatcaaaacagaatttgtccataccagcacttcagattctattctacactgtgcggactcaggcaatcttactggttcccatttagcatgtccaactaatattgcttgaagggtagatttatatgccttctgttttgtaatgctagtcaggagaaacgttccctagtcagatacaatgtccattcccataaaacatttaggtaaagaagatacaacttcttaatataaagtctgtttaaatagtccaactttcataatcctatcaacccttacatttttatgttctagtcccaggaagttttccaccacttgcccaccccaacactccccccagccattttatcctctcttatgcgaaacactgagagtcagcaggaggggattgagccaaaggaccctggctcttgtcaatctttatcttgactaatctacttgactactgcccccaagcaattccaagtggggtttctcatcataatctttaccttcggccttttaaaatttctccaaactggagtaaatacaacaaacttatttgaaaccctttaatattgggggatcagcagaggatccaccaaactttcaatattattgtgttcagacctttgttttagcctcatcaatttccattttattttttccatttcttaataaaactgttaaaagtaaaaaatcttaaataagtcaaacaatttaattgagcaaaaaacaatttgcaaatcagacagcccctgagctagaatagattcagagaagcttcactgctaccatgtggttgaagaagatttgtaaacagaaaaaggaacgtgacattcaaaaagtggaagtgaggaacagaaacagccagtttggttacagctcagcttttgccttatttgatccttgtttgaacagttggctccctttgattggtcaaaactcagtgactggcacaagagtaggttacagtctgtttatacttccagttaggttacagttcgttatatatggataaaccttttcttatttttatttttattttttattttttttgagatggagtcctgctctgtcgcccaggctggagcgtagtggagcaatcttggctcactgcaacctctgcctcctgggttcaagtgattctcctgcctcagccttccaagtagctgggattacaggcacacaccaccacacctggctaatttttagtagagacggggttttaccatgttggccaggctggtcttgaactcctgacctcaggtgatctacccaccttggcctctcaaagtgctggtattacaggcatgagccaccataacccgcctggagaaacctttatacctaacttaaagtatgtaagaaagcagctttaggctaaacttaatttaacataatgatctaaagattttcaccctgttggaatgagtcccatgactctctctctttcttcttagtttcacctttatcattgttttttaaatgacctttaaaaaatttctagctttctgggatgagtcgtttgactctgccctctgcctttttcctcttgctaattaacctaatgtttttattaacatctttaatatctttaaagggaagctgagacagcaaatctgataaggcttctaggactgttgttcagttttgcaagagttaagatgtcaactaataaataaaatcaatactgagccacaaacaaaagaaaagatgttttaagtggggtcttgtgaattgcaatcaagaagtacagatctagcagtcagctaaatcatttcctgttctatccaggcaaggttgggcaggggcttataaatgtttactgtaagtttacatatctggaaggtattagtacagtccatgattgatgtcagttggttagcaacttaggatgtctttggttgatgatcaatctagttcagcatagctgtttccccaagagtttcgcaatcaggccatgtataaacaattccaatcaaatgcagctggttttacaatttggcccagttaaacaggttaaaatccatctggatgtgtacataactgaggtccaactccacatgcctctttttagaaacttctgacataaccatctccattttgagttttctttttacaaaagtcacgtggggtatccatgcgaaaggggcccccttagccacagcatttaccatgacctgggtaagaagcatattcagcagatgaatatcccagtcatcataaattcagtcccacgtggcttgcatgcggtatatcagctgcatcatctggggtatcccaccgagcatttatagggtgagttgagcagtccgctttttcagggcaagcagacattaccatgtcttttatccagttgatcaggctggctgttcccttgggaacaatctgttaacattgatagtgagattcaggcaatatggttaaatattgagtttattcaaacacaaaattttaagatgtccacctgggaggacacggacttcaaaagattggataagtgctctgaagtggaaaggtttgagagtcattatgtaggcagggtctaggaagcttaacaggatgtcagcattttctatacaagattaatgcatagttatagcaattcgatagcagtgtttccttttattgggaagaacgtatttaacattctgcattagagatgtaatagtcaaaggggtcttttatctcagacaaagaatcttttatcttagatgctatctggtctgagccaggaacaagaaaacaaagaaggaagttaagaggtcaagctcagtgactcagtttccttcgggcctaacaacttttagaagcccaaaatagataagactattgggtttttggttgttttttttttttcacatctcctgtgtgtctgcatcaggtgtttaccgtctgtaattgttgcatcatgtatcaccatctgtaattgtttcatagtgaactgtgggtcctacataaacccaaatatgctcttcaatgcaacatttaaaaccaaagatgctgctacttagtttctctcacaatccagttgagtaaagattccttaagaagctacaaaataaacaattccttcacactgtacactgtagtttcagtttcttggttttacccttcccatacactgattgccttttggtaaccacaggtcttagaggtacttactgttgtcctggtatattttttcccttagggacagctttgaggcaagtggctaaagcttagattcactaaaattcgaacttggtcaagcatcagagtccaacccagtccttttaattacatttgatatagtttggatgtttggtccctccatatctccagtgttggaggtggggcctagtgggaggtgttggatcctgggggtgggtccgtcataaatggcttagtgctatccccttggtgattagtgagttcctgctcagttagttcatgtgagatctggttgtttaaaagaatttgggtcctccaatttctctctcttgttcctgctctcactttgtgacatgcctgctcctacttcaccttctcccatgagtgaaagctccctgaggcctcaccagaagctgagcacatgccagcaccacatttcctttacagtctgaataaatgtaagccagtgaaacctcttttctttataaattacccagcctcaggtattttgttacagtgacacagaaatgaactaatacagaaaattggtactgaggtgcaatgcattgctataaagatgcctgaaaatgtgaaagtggctctggaactggctaatgggcagaggttggaaaaagtttggagggctcagaagaagataagaagatgagggaaaacttggaacttttttttttttaactttttcactgagccatgggaacttcttacagactgattaaatagctgtgaccaaaatgctggtgggaatatggacaatgaagtccaggctgatgagatctcagatggaaatgaggaagttattgggaactggagtaaaggtcacccatgttatgtcctagcaaagaactttgctgctttgtgttcatgccctagggatttctggaagcttgaacttaagagtgataacttagggtacctggcaaaagaaatttctgagcagcaaagcattcaagaagtggcctggctgcctcactgcttcaaacagcctacaattatatatgggagcaaaaaaatgacttaaagttggaatttatatttaaaaggtaagcagagtataaaagtttggaaaatttgcagcctggccatttagtagagaaagaaaaagcatttttaggagaggaatacatgtcggctgtggagcaaccactcgcaaaagagatttgcatgactaacagaaagccaagtggtaatatctgagacaatgggaaaaagacctggaagacatttcagaagtcttcaggaaagtccctcccatcacaggcctaggggcctaggagaaaagaatggttccaagggccaggcccagggaccccctgccctgagcagcctcaagacattgtgccctgaatccggccactctggctccagcctcagcttagagtgccccaggcgcaggctgggttgcagctccagagggttcaagccttgatagttgtggtagtttccacattgtgttaaggctgcagatgctcagaatgcaagcatgaaggaggcttggcagcttctacctagatttcaaaggatgtatgagaaagcctgggatcccagtcagaagcctgccacagtgggggagccccaacagagaacctctaccagggcagtgccaaggagaaatgtgagggctccccacagagtccccactagggcactacctaatggatctgtggtaaggggaccactgccctctgagaagtggtcctgagaccactgctcagtcatatcacttggctgcccaaggccttgggagtctatctcttataccaggatgtgggacatggagtcaaggattatgttggagctttaagagccctggctggagtacagtagcacaatcctaacttgctgcagcctttaactcctagactcaagctatcctcctgcctcagcctcccaagtagctgggattacaggctcaagccacagcacctgcctcttcatatgctctttacccaaattttccaattatttacattttgtattttgctttgttaacacccatcagccaaataccactgggaacaaacttataatgagaaacaacttattgtagctttctgcatcaaggaaccccacatagcaaggtgatcatggagtgtcttggtaagaggcatttaggaagggctggctatagagtttcatataagatgctaggtagtattagatataatattaagtaatatcactattaaatactagatatcaattaaaagactattaatattagttaattctgttacctattagatatggctagacaccatcatcttttctatccaaactcccatatttaaatttgttgtgctttttaaagttcttgtaactgttttcccccatcccccagtccaaagtccaattttatgtactgcttttaggtgtcacatttctgtagtcttctttaatctagaaagattcaacaggctttgtctttttattcttgacatccttgaagtatataggcaaagtattttatagaaagatagtcatttgggatttatgtatttcatgtttaggttcagattatgcattgttggtgtggataccacagaagtgttgaagtgtcataacaggggccaaatgatgtctgtttttcccttcattggagatctcaactttgttcacttggccaagatgatatctttcagatttttccactgaaaggttactttttaattaaattttgaaaataaaaacgtttcttacgggagatacattattagtgggcattatcctgtaaagattagcttccacttctccctgatttattaatcagtttcttcaactataaatattctatcaatatggacccacaatccagttaaataacatgtagattaactgttattatttccaactttattgaggtgtattttacatgtcatagaatttacccatttcagtcgtacgatttaataatcttcaggaactttgaacagtggtgtgaccgtcatcataattcagtttagatcattttcgccccccaattggactccttgtgcttatgtacagttaaacctcattctcacctcaaatctggagcaaccactaacctactttctctatatatacatttgcttattctggatattttataaaattgaattttacaatccatggggtttttagactggcttctttaacttagcataatgtttccaaggttcatacatgttgtagcatgagccagttcttcactcctttgaatttccaaataaaattctgttgtatggatatgccatgatttgtctattcatttacccgtaggagggcattttgcttgtttgcagtttggggttatgagtaatgctgctatgaacattcatgtgctaattgaaaatacttgtctatgttggtggtcggcattcctagttaccatttcctgtctgtttttctgcctttcctggcactttccaggcatgatttcaccttcacttgaactgcttcattcaggactctgcaaattccctgaagtagaaggaaaaatgaccacattcaaagtgagtagggcttgcctctcttgctgttaaaattccatcttactactcatattgtcacatttttatctgtcttgggaagactcaaggagaacaacaagcatttgagggcattttgtttgccagatgcttcctttgctgcttttgaattgactttccgtttggttttagttcttgttttcttacataatttcttttctgtagtagataaaatagtaggaatggataattctttcacttcactacttctctgctcacaaattagctgtttttatcttgtattcttcatcatgtacattcataactgtatttttattgatgacatacctctaattttaaattgtgctcgttttatataatattatataatgttccatttttatattggtatcatagtcccaatgaattaatgtaccttcttatttttaactacttcacactcatagacatttaggtggtttaggaattttactgttttaagcaacactgctgtgacagctttcctatatataaccccttccccccaaaattaattctgaaaacaagataggatacttttgacatgtattacattggctgttttatagatggtagattatttcaacagggcacagcacatgaggctctgactgctacttcccacaaatattgttgttggagttttcacacaggaagagctagattctgtgtttgccatgccttactcataccttgtatgcatgttatttattggtctcttcttattcctttatggagtaagcagttttaccaaagtagtaggtaccttcatttgaaatgtccagtgatactggaagattggccaatcacttgtgttgtgttactatatttactcagagaagcagaatgcaggttttagtctcatcttcctcttaaactcataaaatatgagaaatctgctcagattcacataggcaaccaaggtcaggaatgttagccattctgctcatttataatcaaataagtgagaatgatattaatacaatgaattcttcttcctaatcatattaccgaaaccatgggaatatttacaacctgctcttaaccatcataaggagaataagggtacttgtgttcactcggaagagtgggaagtaggtaaaaaatttggaagaaagtatgaaattatgtaatcacaattttaaatgtgtttattgacattctcattttcatttgacattattttaaataatcaggagaataaagtctatataaaattattttctttacaggattgataataaaaaatatttaatatgaagtattcattatttaaataaaaagagatcatttttgccctggaatactttgcagatatgaaatgagatgaaataaataacaataatgacagttataataaaaatagataatatttattaaatacttagtctttgccacacagttttcccaatgctatatatatttccttctttaatccttgaaaaaacgataccaggtgaaaatcattatacagacaggaaactaatgcatgtaggtgagcttgtccaaagccacacatctaggaagggacaaagctttgggatgtgctctgaggcatgatggttccatatcatgacattgaatgatgcaactaatgtatgtagtttgtgccttgagcatatagaggatgcaatgcatagctgtcccacacaggtcaccatatactggttagtttgacagatactaaagaaaagttaacaacatccacagtttgagtatgaaaggaagacaatggaagagaggaagacaatggaaattatcaaagttgggactaaacttctaaatgttactggggcaattggcaacaacacactaaaacctaaatacctgtagcccaggaggcagcatgtagagtcctagagggctacttacaagtagactcaatgactgcacaaagtaaaagtacaggacttcttttatatcattgcacttctgatgaagctcatgaaaatctgcgtgtgtcattgtcaggatataggcagaatgagtgggaaatctgtatgttgacctacatccctcaagatctaggacaacttaccacacctgtcccctttgcctacttagtgccacccttctttgaataatcattggtcataagatttaggttttgtatgttggatattttaggaggcagtgacattcaaggatgtggctgtggtcttcactgaggaggagctggggctgctggaccctgcccagaggaagctgtaccgagatgtgatgctagagaacttcaggaacctgctctcagtaggtgaggacaggcaccctctgtaacagaatgttaggccccaggaatggctttgtattccaagtttgagtatgcattgggaacctaaatttccagtaaattttccctagatattacctacaatgggttggaattaagcatgtcactgtgtgttcacagggaatcaaccattccaccaagatactttccacttcttagggaaggaaaagttttggaagatgaagacaacaagccaaagagaagggaattcaggtaagaaccaagtaactgtgcatccttgtacatgactcttccatctgttttacttctgtccatgcctatttccatcaccctggtctaaattgccaaacttctttcataacttattgcaactgccttccttctttaaagttcctttggcttcattattcatgttcatattttattagtttaataatttatcatacaagattttagactaggaaatttaccagaattagtaacgggttaagtgtatgtatgttattaattatttaattcagtcttttatttctaccaggattttacatatgagatgtgatgtggttctaaattgttctcttgaaaaccaaagaccatagtgcactcggaaaacatgaacttaatgtttcctgttttcattaaagtttaatgccatgtcctaagtgtgaaatcttgaaaacattgaatagggcttcacttgcccacatatattaattctgtgtctttttaggaggcaagatccaaattgagatggagactgttccagaagcaggaccacatgaagagtggtcctgtcagcaaatatgggaacaaattgcaagtgacctaaccaggtctcaaaactccataaggaacagctctcagttcttcaaagaaggtgatgtcccctgccagattgaggcaagactatctataagtcacgtgcaacagaaaccttaccgttgtaatgaatgtaaacagtccttcagtgatgtttctgtctttgatcttcatcaacaatcacactcaggagagaaatctcatacatgtggtgagtgtggaaaaagcttctgttacagcccagcccttcatattcatcagagagtccatatgggagaaaaatgctataagtgtgatgtgtgtggtaaggaatttaatcagagctcacatctgcaaactcatcagagagtccatactggagagaaaccattcaaatgtgggcaatgtgggaaaggcttccatagtagatcagcacttaatgttcattgcaaattgcacacaggagagaaaccttataattgtgaggaatgtgggaaagccttcattcatgattcacagcttcaagaacatcagagaatccatactggggagaagccattcaaatgtgatatatgtggtaagagcttccgtgttagatcaagacttaataggcattccatggttcacacaggagaaaaaccattcagatgtgatacatgtggcaagaactttcgtcagagatcagcacttaatagtcattccatggtccacatagaagagaagccatacaaatgtgagcaatgtggaaaaggcttcatttgtaggcgagatttttgtaagcatcagatggtccacacaggagagaaaccatataattgtaaagaatgtgggaagaccttcagatggtcctcatgtcttttgaaccatcagcaagtccacagtggacaaaaatccttcaaatgtgaagaatgtgggaagggattttatacaaattcacgacgatcttcccatcagagatcccacaatggagaaaagccatataactgtgaggagtgtggtaaggactataaaaggaggttggatcttgagtttcaccagagggtccacacgggtgagagaccctataattgtaaggaatgtggcaagagctttggctgggcctcctgtcttttgaaacatcagagactccacagtggggaaaaacctttcaaatgtgaagagtgtggaaagagatttactcagagttcacaacttcattcccatcagacatgccatactggagaaaagctatacaaatgtgagcagtgtgagaaggggtacaacagtaaatttaatcttgacatgcaccagagggtccacgggggagagcgaccctataattgtaaggaatgtggaaagagctttggctgggcttcatgtcttttgaaacatcagagactccacagtggagaaaagccattgaaatctggagtgtgggaagagatctactcagaattcacagcttcatttacatcagtaagtctatgtgggagaaaagccatataaatgtgagaagtgtgggaagggctttggctgggcctcaactcatctgacccatcaattctccacagcagagaaaaaccattcaaatatgagaactgtgggaagagctttgtacatagatcatatcttttttttttttttttgagacagagtctcactctttcacccaggcctgactgcagtggcgctatctcagctcactgcaagctccgcctcccaggttcacgccattctcctgcctc[221 bp omitted]ggagataatccatacaaatgtgaggagcatgggatgtactacaacaggcacttgacttgatatgcatcagagggtccatatggcagagaaaccgtggaagtttggggagattgccatgtgcttcagttatgcctcaaagtcttcaacttcattggactgttcactttcaagggaaaccttagtaaggtgatatctgtgatagtcttctcaactacaagctcatctgagagttcacaatgggagaagcattaaaaatttgatacatgtggtaagcacttcagtttgagttcatatctcatagcttattacagaatccatgctgatgatacatttcatacagtctcaggagggaaaatatttaagttaaagtcagagtttcagccatagttcagcatacccacgtggttttagaaccactgtagcacagaacctttgtaatttggggcttcattcagaagtttggcaattatagttattcaagagacaggccttagaaagaataggagtttgttcaggcatttacaaatctctaatgatggacatgtcaaaattgatgtcggctagaatataagctgcatttacctttgctgcagaatcttcacaaccttaacactgattggcactttgtatgtgtgtttggtacatgtaagagatgtagaaagagctttggctgggcttcatatcttttgaaatatcagagatgtgatattaaaggatcaaaaggagaaaacatatttcaaaattgtatctaaaagaggaaacctgggatagaccaagatggccaattagaagcagctatggttcatggtactcatacagaggaatgaaaatgacagataaattcagcaccttcaattgaaatatctaggttctctcattgggactgactaggcaatcaattcaacccacagaaaatgaagaaaagtagggtggagttatggcccacttggtgtggcatggagccaaaggaaacctcacccccacccaagggaagcagtgagtgattgtgcgaccctgcgcaggaaaccatgctactcaaggatctttgcaacccacgggtcaggagatctccttgtgagcccatgccaccagggccttgggtttgatacacagagctgtgtggagttttggcagagcggcctctcaggcacacacagagacccaggaggtttacatgctctagccccagaattcctggcaaggtggcagattcatccttatattcccctaggaagggggctgaatccagggagccaggcagcaacattctgtgggccccacttccatggcaccttacaaaacccactggcttggaatttcaaccaaccaacagcaacaggcttcagcctgaaataggagggagctcctgtgggggaaggctggccaccatttctgtggttcagtctactcagcattccagcctgccagctctggagagaccaggttgtctggacaaggagaggatccccctgcccaacacagaacacctgctttgccagatcatgcccagactgctgcttttttttttttttttttttttttttttttttgagatggagtctcactctgttgctcagactggagtgcagtggcatgctcttggttcatggcaacctccacctcttgggttcaagcaattctcctgcctcagcctcccaagtagctgggattacaggcaggtaccaccacacctggctaatttttgtatttttcatagagacagggtttcaccgtgttggccaggctggtcttgaactcctgaccgcaggtgatccgcctgcctcagccttccaaagtgctgggattacaggcatgagccactgcacctggcccagactgcttctttaagcaggaccctgatccattcctccccactgtgtggggtctccctgtggggggtcttcagtcactccagccaggcttatactgacagaaatctaatctctacctcagatggagctcccaggggagtggcgaccactgtctctatggttcggttgacaaagctgttccagcctgctggctttggagagtctgggcaatctgggtgaggaagggtcctcccccaccgcagcacacctgctgtaccaaaagcagttggactgcttctgtaagtaggtccctgatcctgttcctcctgactcagtgagacctcccaacaggagtctctagacacctcctacaggagtcttcaggccagaaactggtcagtatccccctgggacagagtttccaaaagaaggagaaggctgccatctttgctgttttgcagctttcactggtgacacctccaggtacgggaaaaacggaggcaactagggtctcgagcagaccccagcaaactgtggcagccctacagttgctaacagtcagtggcttgactgttaaaaacaggcagaaaacaacaagaacatcaacaaaaagaccccacaaaaaccccattcaagggtcagcaacctcaagattgaaggtaggtaagcccacagatatgataaaaagtcaacacaaaaaaatgctgaaaactcaaaaagccagagcgcctcttctccaaatgactacagcacctctctagcaagggtacagaactgggctgaggctgagatggctgaactgacagaagtaggcctcagaaagtgggtaatgaactttgctgagctaaaggagcatggcataacccaatgcaaagaagctaagaatcatgataaaacaatacaggagctgatgaccagaatagccagtttagagaggaacataactgacttgatggagctgaaaaacacaacacaagaacttaacaatgcaatcacaagtatcaattgtagaatagaccaagaggaggaaagagactcagagcttgaagactatctttctgaaataagacaggcagagaagaatagagaaagaatgaagagtaatgaacaaaacctctgaaaaaaaatatggagttatgtaaaaagactgaacctatgactgattgcggaacctgaaacagatggggagaatggaaacaagttggaaacatactttaggatgttatccaggataactttccaaacctagcatgacaggctaatattcaaattcaggaaatgcagagaaccccggtaagatactccatgagaagatcaaccccaagacacataatcatcagattctccaaggtcaaaattaaaaaatgtaaagggcagtcagagagaatgaaaggtcaggtcccctacaaagggaagcccatcagactaatagcagacatctcagtggaaaccctacaagccagaagatattgggggtcaatattcagcattcttaaagaattctttgccagaatttagtatctggccaaagtaagctttatgtgcaaagaaataagatccttttcagacaagcaaatgctgagagaattcatcaccaccaggccttccttgcaagagttcctgaaggaagcactaaatatggaaagaaaaaaccattaccagccactacaaaaacacactgaagtacatagaccaatgacactataaagcaaccacataaacaagtctgcaaaataaccagctagcatcatgatggcaggatcaaattcacacataacaatactaatatcaaatgtaaataggctaaatgccccaattgaaagacagagaagtgcaagctggataaagagccaagaccgattgatacgccgtgtttaagagacccatcacacgtgcaaagacacacataggctcaaaataaagggatggaggaaaatctaccaagaaaatggaaatcagaaaaaagcaggagtcacaatcctagtttttgacaaaacagactttaaaccaacaaagataaaaaaaaaaaaaaagacaaagcaaggcattacataacagcaaagggttcaacaagaagagctaactattctaaacatatatacgcacccaatagcagaggacccagattcataaagtaagttcttagagacctacaaagagacttagactcccacacagtaatagtgggagactttaacactccattgacaatattagatcattgagataaaaaattaacaaagatgttgaggaccttaactcagctctggattaagcagacctgatagatatctgcagaactctccactccaaaacaacagaatatacatttttctcatcatcacatggctcttaaaaattgatcacataatcggaagtaaacactcctcagcaaatgcaaaagaactgaaatcataacagtctctcagaccatagcacaatcaaattgaactcaagattaagaaattcacccaaaaaattaaaacaaaaatgaaattaactcagaaccacacaactatgtggaaattgaataacctgcttgtgaatgactcctgggtaaatactgaaattaaggcatagatcaagaaattatttgaaactaataagaataaagacacaatgtaccagaatctctgggatgcagctaaagaagtgttaagacagaaattaatagcactaaatgcccacatcaaaaagctagaaagatctcaagttaacaacatcacaactaaaatagagaaccaaaaacaaaccccaaagctagcagaatacaggaaataagatcagagcagaactcaaggagacagagacacaaaaaatctttcaaaaattaacaaatccaggagctggttttttgaaaaaaattaatagactgctaactagactaataaagaagaaaagagagaagaatccaacacaatcagaaatgataaaggggatatcaccactgaccccacagaaatacaagcaaccatcagagaatattataaacacctctctgcacataaactagaaaatctagaaaaagagaataaatttctggaaacatacaccctcctaaggctgaacctggaagaaattgaatccttgaatagaccaataacgacttctgaaattgaggcagtaatagtctaccaaaaaaaaaaaaaaaaagcccaggaccagacaaatttacagctgaattctaccagaggtacaaaaaagagctggtaccatttctactgaaactattccaaacaattgaaaagaagggattcctccttaactctttttatgaggccagcatcatcctgataccaaaatctggcagagataaaacgaaaaaagaaaacttcaggccagtatccctgatgactatcaatgcaaaaatcctcaacaaaatactggcaaactgaatccagcagcacatcaaaaagcttatctaccacaatcaagttggcttcatccccaggatgcaacgttggttcaacatatgcaaatcaataaatgtgatcacataatgagaaccaaagacaaaaatcacatgattctctcaatagatgcagaaaaggcctttgataaaattcaacatcccttcatgctaaaagctctctgtaaactaggtactgaaggaacatacctcaaaataataagagccatagatttcaaacccacagccaatatcatactgagtgggcaaaagttgtaatcattccccttgaaaactggcacaagacaaggaccagccccccgccctttccccactcctgttcaacacagtattggaagttctggccagtcaagtcagacaagtgaaagaaataaagcatattcaaatagagaggaagtcacagtatctttgtttgcagatgacatgatcctatatctagaaaaccccatcatctcagcccaaaagctttttaagctgataagcaacttcagcaatgtctcaggatacaaaatcaatgtgcaaaaccgctagcattcctataaaccaacgacaggcaagcagagagccgaatcatgaatgaactcccattcacaattgctacagaaagaataagttatctaggaatacagctaacaagggaagcgaaggaccccttcaaggagaactacaaaccactgctcaaagaaatcagagaggacacaaatggaaaaacatttcatgctcatggataggaagaatcaatattgtgaaatggccatactgcccaaagtaatttatagattcaatgctattcccattaaactaccgttgacattcttcacagaattagaaaaaaaaacctattttaaaattcatttggaaccaaagaatagcccaaatagccaagacaattctaagcaaaaaagaacaaagctggaggcattatgcaacccaacttcaaactatactccaaggctacagtaacgaaaacagcatagtactggaacaaaaacagacacatagacaaatggaacagaatagagaactcagaaataagaccacacacctacaaccatctgatattcaacaaacctgacaaaaacaagcagtggggaaatgattccctatataataaacggtgctgggagaactggctagccatgcacagaaaattgaaactggaccccttccttacaaacattatacaaaaattaagatggattaaaaacttatgaaacccaaaactataaaaaccccagaagaaaatctaggtgataccatccaggacatagggacaggcaaagatttcacgatgaaaacaccaaaagcaattgcaacaaaagcaaaatttgacaaatgggatctaattaaactaaagagcttctgcacaccaaaagaaactattatcagggtgaacagacaacctacagaatgggagaaaatctttgcaatctgtccatctgacaaaggtctaatatccagagcctacaaggaacttaaacaaatttacgagaaaaaaaaccattaaaaagtgggcaaaagacatcaacaggcacttctcaaaagaagacgtacatgcagctgacaaacatgaaaaaaaagctcaacatcactatcattagataaatgcaaatcaaaaccacaatgagatactgtctcacatcagtcacaatggcaattataaaaaagtaaaaaagaagccatttgcagcagctcaaagtgctgtaatcccaaacctttgggaggctgaggtgggtggatcacttgaggtcaggagttggagaccagcccggccaacatggcgaaacgaacccctgtctctactaaaaatacaaaaaattagctggatgtggtggtgcatgcctataatccccagctacttgggaggctgaggcatgagaattggttgaaccggaggcagaggttgcagtgagtcaaggtcatgccactgcacttcagcctgggcaacagtgaaactgtgtctcaaaaaaaaaaaaagtcaaaaagcaacagttgttggtgaagttggggagaaaaaggaatgcttttacattgttagtgggagtataaattagttgaaccattgtggaagacagtgtggcaattcctcaaagatttagaggcagaaataccatttcacctagcaatcccattactgtaatatatacccccaaattataaatcattctattagaaagatacatgcacttgtatgctcactgcagcactattcaaaataacaaagacatggactcagcccaaatgcccatcaatgatagactggataaagaaaatgtcatacatatagaccatggaatactatgcaaacataaaaagaaattagatcatccaggacatggatggagctagaagccgttatcctcagcaaactaacacaggaacagaaaaccaaacactgcatgttctcacttataagtgggagctgaatgatgagaacatatggacacatggtgggaaacaacacacactggggcctcttggaggggtggagggagggagagcatcaggcagaatagctaatggatgctgtgcttaatacctaggtgatagattgatctgtgcagcaaaccaccatggctcacatttacctatgtaacaaacctgcacatcctgcacatgtacccctgaacttaaaataaaagttgaagaaaaaactaaatcatagtattaaaaaggagaaatcttgcaagaaataatttatggaaacatgagttgaaatgcagggtacactcagcactgcaatgtagacctttattttgattattatcttattccacttggctcctggcttctcctcatcctctgttctcaagtcggattcttattatttgggactctgtctagtgttcccttgattgtatatagtataaatttaacaatcatttgtcacttttctcacaatatgaggtgaaaagattttgtaataacagaccactgcatattgtacaattaagttttttcaacaattttaaggcaggattcacagtaaacacttttttcttttaaaaaattatttttaaggaatagagacagtctcaccatgttgcttggctggccttgaacttctaggctcaggcaatcctcctacctcagcctcccaaagtgcttgaattataggcatgagccaccacacccagcccacagtaacatttctaatgtggcagatgtagttacattgacaaaaatttttctggtaaaggccaggtgtggtggctcactcctgtaatcccagcactttgggaggctgaggcaggtggatcacttgaggccatgggttcgagatcagcctggtcaacatggcaaaaccccgtctctactaaaaatacaaaaattagctggtgtggtggtgtgtgcctgtaatcccagctacctgagaggctgaggcatgagaatcgcttgagcctgggaggcggaggttgcagtgagctgagattgtgccactgtactccagcctgggcaacagagcgagacttcatctaaaaaaaaattcctaataagttttgaattgatcatgatttgtgattctgcgtttctgtgcaggctttaatatgattgccttctaattgctgtagttatttcttttatcagacttctcaggtagaagctttgccaaatttgaaggaaaatttttggcaacctcagtatttcttcccatctctatgaactaccaagaacatttgttggagtttggtgatttcatcatacatattcattattggagcaagagtaacctttacatactcttctttattgttggccataagaatacgttttttggaaagtggtatatggcagtatgtataaggtacaactgttcaacctggaaatcataggatagaaaattacaacattaaaactctgaaaattagtagattacatggatgatgtcacttaattttaaaatggaaagaacaagtgttcaaccacaggaatttgtatgaagtgcatttattaatataaaaacacaaagccagtaaaatgatgacatagatgtacaataaaaagagaagagcataatgtatgccttagggaaatcctattgtagccttcataacaaactaagtgtctttgtgtttctgggtttgtttatttggttatttttagtgtgtatgtacatcatttgtggatgaatattctgacattttccctggcaatgagtatttgctggaatttttcattttataattttatgcattttaaatttctcattgaacaccaattttaccaaagcagttatgtgatgaaaaatttgaaaaattattaatattaatcacttacctataaggactctgaataagattgctctacattgtcatatgacagttcaaaattaaggaatagggatgtggaagtcatatttcaaaataaaaaaatgtatctggtcacctggatatacagattgatgagtgtggtcaactgccttcataactaatgtgtgtgattctgctttaggcataagtcaggaagcaagcaaatcctagtgacagaaataatgtgggtatatatagttgtggaggttaaaaaaacagattctttgaagaacaaatgcgcatgatcagggaacttaacatgacagcagcagtctcttagtgtgtggaaccagctcggacaaagagctgatttgggtgctaattcatagttatacaccatggtgtaacttaactgtattaggttaaaaggcattcttcaaagtgtctagttgagatagtaagcttttcataattaattttctaaataatgtattttcatgatgctatattcatgctgtgccagtttggatagtagattggaggtccctaagaccacctctgggttctgtgatttactaaaataactgagactatagttgtacttataacaatattacagtgacaagatacaaaacagaatctgtaaagggaaatggctcatgggcagttgtctagaggaaaccagaagcaagcttaccagagtcctctctgcatggtgttacataagactcaactcctctagcattgaattgtgatactacttgtgaaatgtctacaatggaagctcattagcaaccagcagcacaggttcttattgagattgattatgtaggtatgtgtctagtacatatcaagattcccaactctaagaagaagagcaagtgttccaaataagctgcattgtagagtttaggcgcagtgaccactcctacccattatggaaaggtggtaactctctcaaaccccatgttccttgactccagccaaaggccagtgttgcaaacagctctttttaaagttagcagtctgacttatgcctgctatgttaactttttgtgcatgtggtatcagaaaagtagggcctgcagtcttgtggggttttcttaaactatcaccagataatagttcatctctaagataattatttgtaaaagaaaattcatcagattacatttttaaatatttttataataaaaaataccataggtaggccttccatctaccctcgtgtgtgtctgggtcctcaaattggtcacaggatgatattaacagctgatttgtttttattgttcatatttatgtctcacagactgcatgagtatttgactcccaataaaactgaatattgaatacctagcttcatatgtagtacctgagcttttgtgtggccagtatttcttgccacttctcacgatggactgggtctcttttatgtatatgaccctggcaagttcactatgttaactttgaaattgggtacattattataattgggaattattgcagagtctcaatctctgtgtttgaaaaatgagggaagcttcccaagttattattctctgaccatatcagtaggatatccatttaaatgtttgagctaaatgccacaacatttgtgtgtgtgtgttttttttttttttttttttttttgatacactatgacaataacttcctggatagatttgttgttgtttttaatttttatagtaaaaatacactcattttacttgcaagaataatgtctagacattggaaacaattactttggtacagaaaagtctaaaaaagaaagtggaagataggaagtatgaatattttggtaaggatggttcagcatatctatgcatataggtaacaattgtatagaattttacaaaactaggaacacactaagcatacttgctcctaacaggattgtcctaatatgacactaatgttaaaggctgtataaataagttgacctccaacctcatttctaatgcctgctgtatcctggtgtactgaatattaatttttccttaaacagttttctgatgatgaggatctgtgtggtatcaattttaattacaacatgcctagactacagtccctagttatttaatcaaacagtaatacatatatatatatatatatatatggaaggcattttgtagatatttagcccataatcagttggctttgagtagggatattatgtgagataatgtcagtgggcctgatgaatcacttgaaattatttaaaagtagagctgaagcttctttgaaaaaagaaattgcaccttttagtagcatcttcctctcgtgggttagtgttccatctgagccatcctggggtatagccatatgttttttgcagttgcttagccagtcccacagtggcataagaaagttccttgcaataaatcatttgtatatgtcatattgattttgttactccgtttcaacgctgaccaaaagatattttgttccagaagtggttctagaggaagagaatcttaagaatgagttttctaaatcaattctgtgttttctcaaattggatttctcatcttttttagtttaaaggcactattgactttatttccagtggaaaatagggcattggttgttaaagccacgacatggtgataaatatatgccaaatatattggataatcccaagcatatacctatagaaggcatgattctagatgaccatgaatttgttagtttcggacataatagtcaaacgaaggactatagtggtatttactagttgctctgatttgtgcttcagaaagtgggaaagaaaaagatgaggacaaggcatcaaattccagctcaatcagaataacctgaaagcgtcagtcattatgcatggcttcttaaccttgtgttgttgatcttggcattcatagtaaataacttgacaggaaatctattacactgttactttatttgtataggcaggaggattctcttgcaagtaaacagaaatccaactggaattacctaacagaatcacatctcccaaatcaattctaagacaagtccagtttacaaatccacaattgcttcaataaacgggaggtcagttctgtattaggatggacgctggtacgttgcagagtgcttcacaaggccctacagccattaacccgtgtgactatgtactcaaaaggagaaatattcaaacatcttggcaacgactaactcctattatcaaatggcacgtttatattttgatgattgggcctggtgagaaggaagcaggaaggaatctaggcatatttgtaagatacatacataccagagggaagaaataaatcttataataattcatgggcctttcaccttggtgaaatttccacaagttcactgatgtaggcctattgagctatcccttctgggtgtagggcaagtagaatatagcccttcctacgatcaaaaaatagcgtcacaacgcctagtggaccactggggctattgtatgctacttattcctcattgaggcgtgctactttgcctattttgtgtgacctgaaaacattttgactcatccaagataagtctgtgcaatgtgtcccagctgctatgtaagtttctctgccatcaggaccctatgacccagaaaagccaaaagtgattaaaatgttaatgaaagatagtgatggttgagcctttggctggccctagttagtaaatcagcactttacaaggctgaggtgggagaatcgcttgagcccaggacttcaagacaagccttggcaacatagcaagaccttgttctaaaaaaaaaaattgaggcgaacagaccaaaaactcaacataaaaatgggtaatagatttgaacaatttacaaaaagaaaaataatattgacacaggaaatatgcaaaaatgttctatgttatttaaaaaacaagaaatataaattaaaactaaatttaaatacacttcttaccatttgattggcaaaactttaaaaatgttgtaataacacattttgttagctagtttcaaggcaagagtatatttatacattacttctgcaaatggaaatggtaccaaaaaattaaggcaacttgacaatatgcaacaaaatttctattaatatcttcacttttcaatcctgctttctgggatgtactcttctgatgtatcttcaacagggataatatacaaatgtacaagtgtatttataacagcatcatttgtaataataaaatattggaagtcactgaaatgtccataaattgcagcactgttatataaaccactcaatggaatttatgcagttttaaaaataaattactccatatgacatgatttccaagatgttattatgtgaatatagaagaattagaagtgtactatcctaacatttaagtaaaaaggaaaaataagaaacacatctattctgttaaaaaaaagtggtaatgaaaataataaaattagttacataaaggtgttaggtggcaacactgtggaattggtttaggggtaggaaggaggggagtggcacttctctgagaataatatgtggtagagcattgactcatgggaacatgttgatgactgacatacccaataatataaaatcaagaatgagatttctttgtagataaactaggaaagtgaaaatcatagaataacaaattaacctaaatgtatttcaaatcaataacataaacagtctaaaggtgacagcaagaagtaatttaagcaacttattaaacagtacagtgtttgactatatatcctcagtctaaagacaaaaagaactataaaaaatgttgaactctacttttgcattgttttttacaatgatatgaattagtaactctgacactgcatgatgcgtatgcaatggtcttaatgtttgtggcccaccaaaatccatatattgtaatttttaccctcaatgtgatggtaataggaggtggggcctttggagggtgattaggtcacgggatgaatacccttataaaaaatgccagaaggagcttgtttgtcacttcaaccaaatgaagacacagcaatatggtgctaactatgaacaagaaagtggccaactacctgacacaaaatctgccagtgctttgatcttggatcccagtttcca[138 bp omitted]cctcttctctaccaaaaatacaaaaaaattagccgggcatggtggcgagcacctgtagtcccagctactcgggaggctgagacagaagaatggcatgaacctgggaggcagagcttgcagtgagccgagatcgcgccactgcactctagcctgggcgacagagcaagactccgtctcaaaaataaaataaaataaaataaaataaaataaaataaaataaaataaaataaaataaaagccaggcaggctatgatattttgtgactaaaaaatattggtactgagaggtgggcttgctgctgcaacaaatacctaaaaatgtagcagtctttggaactatgtaatggatagagtctagaagagtttttacatgtatgctaggaaaagcctacattgccatgaatggactgataaggacaattctggttagcgctcagaaatagagaataagaactgtagagaaaacatcaatcttgttagagcatacctaggtagtcatgatcagaatgttggtagaaatatggacagtaaaggccattctgaagacctcagtcagaaatgttgaacatgttattggaagagaagagagcttcttgttataaagggacaaagaatttggctgaattatattcaggtgctagtgttttatggaaggtagaatttgtgaatgatataattgtttatctgaattaatttctaatcaaagtgttgaagttgcttgaatcatcttgactacccgtagtgaaaggcacgaagtgaggaatgactgaaataattattaattaaaagggaaacagaactaaaatttttaaaagtttacagcctatctactttggaaaaaaaaaaaaacaggaaacctgaagaatacaagggtatggttaagcaactaactaattcatgaatttagtatggattggccatgtcaactgaagccaggacctattgtccaagacaatggaagaatgaccccaaaggcatttcacagattatggcagcttctcctcccatcacaggcccagagtgcaaggacctgggggacagaaagggcctttgatgccagatataccctaatatattaggcacagtttcctgcctactacgattgagcgtgtcaataaatttttatctcttgggagggcagaacagagcaaggatacagctgtaactggtttagaaatagcagtcactcaattttcagagaagtgttcctcatactgtggttggcacagtcactttatctaaagaaaaccatgaaaagtattcttttttagtttagaaaaattgatatagaacatgagactccatttttttaaaataaaaatataggttgataggccagaattcacaggtccacctgcctgagccaaaattctcacgcctccacagagcaaatggactccatttcccaagataccagcgaaacgcctgcgggagtctaattgcccggtcgatgcgcaggaaatttggctcccgcaggcgtttcgcgagtagcttgggaggcgtgggaattttggcccaggcaggaggacctgtgaattctgggaagtggagtccatttgctctgtggagtcgtgggaactttggctcaggcaggcggattcgggggattctgggaagtgtagtccagacgcctgtggcatcatcgacacttccggtctccgagcaggacactgctacttaacaaggtggtttgagccaagtatgtgtcttgcgggtctttgcgaaagtgaaccagttattaggggcgcctaacgacctggggggtcaactaagggggtaagaagccctggagaagacctgaggtttggagatgcgaggggtgggagggaagtttcgttgccgtcgatggagccttctggcgttgggggctgtactcaggtccaccggaggagtcgtcgggggttcggggggggcggggaagaactctgtctagtcttgtgtgcctgtttagagggttttccaggtgtttgacctcgttcagtccgcctccctccactcttaagtgtgcgacctctttctcgcgatataacgtggggtgttacttaatctccctgtacctcccattgccgttttttaaatgaggatttcaggaccatcctgatagaattgttttaggagttgaaagttgtggtataaaacaaagacttaacagctcctgtcacttggtgtcctgttaatttcccgcgaagtggtcaggtgcccgggtggggtcagagctccagctgctccggcccttctcttggagcccggcagggctctggatgatcccggacgcctctgacctctttttaggaaggcgtgggttgcatccacgtttcacgaagggagaggagcatttaacttgtatccgggacggcgacgcagagtgtttgacagctttctccttccccagcctgacttttctaaaagagctgcagggagggacttggctactgaggacaaagctgtctacacgagtggtctttggcttttctctttttaaaaaaaagttatttattttgttagtctgtttttattattgttattatttgagaatgaggtttgctctgtctcccaggctggagtgcagcagtggcgcgatcttggctcactgcaacctccgcctcctgggttcaagcgattctctgtcct[134 bp omitted]cggcctcccaaagtgctggaattacaggtgtgagccaccgcgccgggccggttttttcttttacagagatgttcacctcaaccaagagtgtataggatgtgtccttgggcatgggtgttgataataattaaaccttaattggtaacttaattctaagggctttatggaaataaatacatttacgccacaccatggctctgtggaaaggtattgctctttttcttttttttttttttttttttttcctgagacggagtctcgctctgtcgcccaggctagagtgcagtggcgcgatctgggctcagtgcaataggccgcctcccaggttcaggcgattctcctgcttcagcctcctaagtagctgggattacaggtgcgcaccaccacgcccagctaatttttgtatttttagtaaagatggggtttcaccgttttggtcaggctggtctgaaactcctgacctcgtgatccgaccgccttggcctccgaaaatgctgggattacaggcgtgagccaccgcgcccggtcgctcttttccattttaaatatgggagtgagacacctggtgcttagttcccagtagaatgaggtacagctggagctggaacctaggcagtttgggtcagagcctgagttgatcatcccttggatacattttcattgaggtagaggaactagctggaatcaggtggggaaagagagttaggacttgattgaagggaccttgagagcaaggctcatagacttggacttctgtaggagtcttttaaaaatttgtcaacatcctgtttcactttttataaggattttgtattgtggaaccatatcattgtggagcattttaaaattagattaataggaggagaaaacatgttttaaattacccatgaatccaagatgtgaaggtgctaactgtctgatacaagagatggaacttccagttctcctccgtttctttttagtctttctctgtgtctattgtatatttatttataagcatttaaaaaaattgttataatatcttaatgtgttttcccatatttctttaactatggaaatttttaaatactgctaatagagaataaactagtaaactgccatattatgtcatgctcatccaatattattcccatttgtgtttttttttttttttttttagacggagtctcgctctgtcacctaggctggagtgcagtggtgcgatctcggctcactgtgagctccgcctcccgggttcacaccattctcctgccccagcctcctgagtagctgggactacaggtgccggccaccatgcccggctatttttttgtatatttagtagagacgaggtttcactgtgttagccaggatggtctcgatctcctgaccttgtgatccgcccacctcggcctcccaaagtgctgagattacaggtgtgagccacggcgcccagcccccattgttatcatccttatgactatttcctgatagttgaaaacctttcatttttatatcatttcaaagctgtagaagagttgcaaaaatagtataaggaattctcatatactctttacccaaatttgccgattgtttacatttttcctgtttgctttgttggtggccatcagccaaatactaccaggaacatatctgtaaccagagacgattgtagatttctgcagcaaggaagcccacattccatggtgatcatggggtgacttggtaagaggtgtttagaaagggcaggttatagggtctcacgtaacatgctagacaatattaagatatcatattaaatgatatttattaaatattagatatctgtttaaaaaactactaattgtgcttatagtgttataattagatagtgctagatagcatattccataacatcatgttatctcatatgtggttccataattaaatttgttcaattttttcatttatagtcctcacaactatcttctaccctaccctttaccctgaccccagtttaaagtctaattatatgcattgtgtttactcgtcacatttctgtcttctttaatctggaaggatttcacagcctttttctttaatatatgtggtatttttaaagagtgtaggcaagttattttggagaaagacgttcattgggatttatctgatatatctcatgtttaggttcagatcatgcattgttattgcttctgggccttatgcattgttggtgcggatactgccaaagtgataaggtttccttcctattgtaacataacagggccaaacgatgttggtttggcccttcattggtgatctcaacttcattcatttggccaagatgatgtctttcagatttgtccactatcaaattacctttttaaaagaaatagtcaagtttcttctggggagatacattattaatgggcattcactctaaaaatgaactgccagttctcccccatttatttattagtttcttcaactataaatattctatcagtatggactcagtcttgttaagttaaatgacatgtaaactaacaattatttttcccaattctattgaggtattttttacgtatcatagcattcaccaatttcaggtgtacaattcagtgatcttcaggaatttcacatagtggttttgccatcatcatgattcagtttagaccattttcatcccctaactggacttcttgtgcccacttacagttaaaactcattttcaggccgggcacagtggctcatgcctgtaatctcagcactttgggaggccaaggtgggaggtatagcttgagctcaggagtttgagaccagcttggacaacatagcaagaccccatctcttaaaaaataaaaactcattctcacctcaaatctggagcaaccactaacttatattctctctatataccattatctattctggatggttcatataaatgggatcgtataatccatgggttttgtgattggcttctttcatttagcatgatgtttccaagctttggaaacatcctttaaatttccaaataagattccatggtatggatacaccaccatttgcctatccatttacccagaggaaggcatcttggttgtgtgcagtttgggtttattatgaataatgctgctgtgatcattcatgggctaattcacaacacacatctctctttttctgcagactgtggcacgtttcaggcaggattcctccttcattcaaactgcatcacccaggagtctgcaaattccccaaagtaggaggaaaaatgaccacattcaaggtgaggggggcgtgcctctctcgctgttaaaattccatgtcactactcatattttcatgtgtttttctctgtcatgagaagactcaaggggaaaacaggcatttggggacctgtttgtgccaggtgcttcctttatctcttttgtgttgactgcatttggtttttggttttgctttgttttgttttgttaccattatttattttatggagtatgaaaattagtagaaatgaacagtgctcccacttccttacctcccctctctcaaattatctgtttttatcttctctgctgttcgtcatgtacatttgtaactgtatttgtattgatgatatacatctaattgtaaactgtgctctttttatatgttatataatcttccatttttatggttacatcatattcctattacattgatgtatctttttatttataactacctcacgctcatagacatattttaagcaacactgcagtgacagctttcctatacataaccttttcccacaaaattaattttgaaaaccatatgccattttagctcaattttgaaagggtacttttgatatgtaccacattggctgttttgcagatagaatattttaactaggcacagaacaaaaggatgtaactgctgcaccacacaaatattgttggagttttcacactggaagagctagattctgtgttctccttgtctcagtcatactttgcatgtgctttatttactggtctcttcttattcatttatgtagtaagcagtttaaccaaagcagtagaaagccttcatttaaaatgtccagtgatactaagttttgccaatcacttgtgttctgttactacatttactcctcagcgcagcggaatgaggttcctggtctcttcttcttcttgaacaggtgaaatatgagaaaccttctcaggtgtacacaggcaaccaaaggtcaggagtgttagccattcggctcaggtgaaaaagagaaacaaggagagagacagaattctccattgagcaacctgtgccctgtgatgtggatgtctggagtgccctgtggagtgatggtgtccctagtggtgctgctcctccctgtccctacttggtgtgacttcttgtcacatgtcactatgacatggcatctactccaggcactgaagtatactgattaccatagttgttatagaaaatctttaaatcccttttggcaaaagatgcctcacacaatgttaccagaagaaataatgacctggggcagaaatgttagccacgtggatacctaaagaaaataaaattcaaaatcaaaaccttgagcacagaataaaggaaaaactccaaacagataggaacaaaggacactaaaaggccaatgtaaaaggagaagtagagatggccaataaccttgaaaagtgatggttttcatttgtaatcaaataagtgagaataatagaatgatttgttccccaaatcagattaccaagactgtgggaatacttataacctgctcttggtcatgataaagagaagcaaagtacttgtattctgttcaaagattatggaggtaggtaaaaaactgggaagaaagcatgcagttatatgatcacagttctaaatgtgcttattttttgatgttttaattttcatttgaaattattattttaaacaatgagagagtaagatgttcttacatcttgctacatcattacttaatgatgctctttacaggattgataatggaaaatatgtaaaattaaatattctttactgtagctaaaagtaggtcatcagatctctggaatactatgcagccatgaaatagataatgctagtaacaacagtaaaaaagattccagctaatgttcattaaacagtggcacagatgtttccaaatgctatgtatttccttgtttaatcctttaaaatactgtgccaaataaggactattatttagagaggaaagtaaatcctgtaggcaaacatgtctaaggccacacagttaggaaggggcagacccttaggatgtacagtgatgcattctggcttctgatcaggacactgaaggctgcaattaacatttgtggtttgtaccttgagagtagaggacacactacataactgtcccactcagctgtccacactggtactgtggagtaggttcactgtgcactgattaccaacttgtgtgagtcctgtgagacagaacacgatctcactcaacagattacgtgaagcagatttgttatctacaaattggcagcaagggagcacaggagtgtaggatacactgtgaggtggccatccaaggctgaagaaaacgtcctggggtgggtagaatcttgaccccatttccaccagagcagaggtaccccagaaggcagcccacccgaggttatatacctccggggcaatacgacttactgggcactttctccctaactcaagacattatcttccctaggaaggacaggaacattgcattgctagcatgttctatgtttattcttcaaaactatacacaagaaagaatgattcaaggccaccctgaaaattacccacagttacctaaaacttgttagtttagcaaatactaaagaaaagcaatagcatccagggtttgagtacgagagaggaggacccaacaaagttgggactgaattgtttaatgttgctggggcagttggcaagatgtgtcgaacctatatatgggtagctcaggatgcagcatgtagagtcctagagggttacatacaagtagactcaatgagtgcacagaataaatgtatgagacttcatcattgcacttctggtggagttcaggaaaatcagtatgtgtcattgtcaggatatagacagaatgagtgggaaatctctaagttgacctacatccctcaatactgagaacaactttccactcatccccttcccctgctcaatgccgcttctcccccagtagtccttggtcataagattgaagttatgtcttcttgatgttgtaggaggcagtgaccttcaaggatgtggctgtggtcttcactgaggaggagctggggctgctggaccctgcccagaggaagctgtaccgagatgtgatgctggagaacttcaggaacctgctctcagtgggtgagcacgggcatcttttgtgtctgaacatcaggcctcaggagtggttttgtaccttagagtgttcaagtttgagtgtgcattgggaacctaaatagccagtaaattttgcctaaatattacccagaatgtgttgggattcagcacgtgaccttacctattcacagggcatcaaccgttccaccaagatacttgccacttcctaagggaagaaaagttttggatgatggggacagcaacccaaagagaagggaattcaggtaagaactaagcatctgtgtgtccttgtacctgactctcccacctgttgtgcttctgtccatgcccatttgcattgctctgatgtaaatgaccacatctccttcctggattattacaactgccttccagttggtggccctgttcccaccctaatatctgttctcatggcagccaaagcgatccttaggaaatggaagtcagattgtcattcctctcctcaaaagcttttataacttcttatttttattgatgttacaacctctttaagtgcatcttagagacctatgtggtctgctcttcatcccattctgcctctctgactacgtgtgtcctttccatctttctccatcatttccagccacatttcttccctgctgtttctgtcctgccaaggacactgtattgcctgttgtggtaaccaatgaccacaaacttagtggactaaacaaaaatatttattatctctctgttctttaggcctgaagtttgatacatttcactgggcaaaaatcaaagcgtccctagggctttgtttctgcctgaatgttcttggagggaaaacttcactttggtttaccagtgtctaggcactgtccacactccctggctcttgtttcacgtctccatcttcgaaggcagctactttgcatctctgaccattcttccataatcccattccctctgccactcttcctaagcctctgccttctacctttcaggtcccttgtgattgcattggtcactcctgcataaaccaggatgatcttcctaccttctgcttaggtgactagtgaccgttatggcgtctgccgttttaatcccccttgctgtgtaacataataggaaggctgactgtatattgcagaacagtttttttggcctgctgatggctgcttatccaattctgactttcttaggttccttgacatgattggtttcaggtgtgtacaattgacccacgtcccgtggaaacttctaagcattgtttttatgaccacactgagtaagatgccttccctgagacttatcctggagctttccatagggagcatatttatatctgggaagaaattctttttgaatgaggatttccagctacatttcctttgaaagatttacccatctgcagcccatttgccttttccaaagtctatatacacttcactggccccagcttcctccttcgtactagaagggggaagaatgaggatgaggggacacaagtcatgtagctgaacatttactctatttctggtcctctttcttcataaatgtgtctatttctgcatctttatgtcatacaagttttgttttcaaaaacattaaaggatatagattttacacaattttttcttgatttttatagatttagtgctgtattttgaactggtgaactttatgacctgttaggaattgggaaactgccctctaaaactagaaacatcctgaagattctcctttctccttaaagatttcttattaatttaatttatttttgagatgcagtttcgctcgtcacccagcctggagtgcaatggtgcaatctcggctcacagcgacctccgcctcccaggttcaagtgattctcctgcctcaccctcataagtagctggaattacaggtgcccaccaccacacccagctaatttttgtatttttagtaga[141 bp omitted]tattaaatatatctacgtaccactgtataccaataggtacacacttacctataaatcctttccaagattcaacctctgcaacttaactttccattggaagaatttacttaattcaggacttggtattatcctgacaaagttttgaatgttttgcaagcatgagccatagtaagaagcacatatttcaatataacccggacaaacatttttcatgcctgtagatgtgtatgagtgactctaggaggcatttcatggaatgaccactttcctgcttgtcatgatgctgtgataatttacattccagttcttttttgtaaatgtttattgcagagtttaactgtatttcatagctcactaatgtgtagtcttcaatataaaaagttataaagtcctatttatctgcatcataggctttcttttcatttcatgtgattcttcacatttttgattgtctgctcaggagcatccccctttgtggacccctggaaggacagcctttcagattcccctcaaaactgtagttgtgtgtctctgtactccttcagataaccaagttactctccacatcaatacagaaaagtaagatgaagtattttacatatgctgtgcaaaattcttgtgcagggatactttgaatgtgtacatagaaacactatgaagtgtttgatgtttaatgttgtgcagagttcaaccaactacaaaatttactgagacattttacagagaactgctctcacttcacaccaagtgcaaattcaggaggttttcaaaactgcctttgcattcaataattttctaaactctcagaactcactgaatacttttattctcactgactgatttttacagggaaaacatgtatattatacttagagaaaaaccaaataaaacagggtccagatgagaataaccaaatgcggaccttctattgtattctcctggcagagtaggatgtgttacattcccaggattaaggtatgacttagactcaaagtactgtcagtcacagaaactcacctaagtgctgggatccagagtaattattgggtctccattatggagccagtattgattgatgattcctaggtggttaatcagtctcctagtccactaactctctgtgacctaaagctccaccttaaatcacattgcttatttctgacatggagaggagcatctcccactcccaatcccccaaaggatttgccagttgcaaccataaattatattgtttcactatgcagagtgatccagtgattgccttcaagccaaccaagacactctcctgaggtatgacacttcaggatcctagagattacctctcagatgctgaggacaaagtcccaacctctttttggttaggttaactttttttttttttttgaggcagagtctcgctctatctcccaggttggagtgcagtggcacgatctcaatctcagctcactgcaacctctgccttccaggtttaagcaattctcctgcctcagcctcctgagtagctgggactacaggcatgtgccaccacacgtggctaatttttgtatttttagcagagacggggtttcaaggccaggctggtcttgaactcctgacctcaagtgatctgcccacttcagcctcccaaaatgctgggattacaggtgtgagccactgcatccagcacttttttttttttttttttttgagacagggtctcgctctgtcacccagggctcactgcaacttccacctcccaggctcaagcaattcttccacctcagcttcccaagtagctgggactacagagtgcacgaccacacctggctaatttatgtatttttagtagggacagggttttgctatattgcccaggctggtctcgaactgctggactccagtgatcaatcccaaagtgctgggattaaaggcttgagccaccgcacctggcctagtttaacttctttataaggatatacagcataaacacaaatatacaaagtgttgattaagttattgcttttccttaaagttccttttgattcatatttcattatgtacataaatttttattttcataatttatcatgcaagattttggactgactaggaaattcattacaaatagtaacaagttaaatgtatatcatatttttaaattaagtctattatttctatcaaggatttcacatgtgagacatgatgtggttctgaattggcctcatgcaaaccagaaatcagggtgtacttggaaaacaaactgaacattctctgtattcattaaagtttaatgtcatgtcctaagtgtgaaaccttgagatcactgaataaaggcttcacctgtacacatctcttaaatctgtgtctttataggaggcaagatccaaactgagttggagtctgttccagaagcaggagcacatgaagagtggtcctgccagcaaatctgggaacaaattgcaaaagacttaaccaggtctcaggactctatcataaataactctcagttctttgaaaatggtgatgtcccctcccaggttgaagcaggactacccacaattcatacaggacagaaaccttcccagggtgggaagtgtaaacagtccatcagtgatgttcccatctttgatcttcctcagcagttatactcagaagagaagtcttatacatgtgatgagtgtggaaaaagcatctgttacatctcagctcttcatgttcatcagagagtccacgtgggagagaaactctttatgtgtgatgtgtgtggcaaggaatttagtcaaagctcacatctgcaaactcatcagagagtccacactggagagaaaccattcaaatgtgagcaatgtgggaaaggtttcagtcgtagatcagcacttaatgttcatcgtaaattacacacaggagagaaaccttacatttgtgaggcatgtgggaaggccttcattcatgattcccagcttaaggaacataagagaatccatactggggagaaaccattcaaatgtgatatatgtggtaagaccttctattttaggtcaagacttaagagccattccatggttcacacaggagaaaaaccatttaggtgtgatacatgtgataagagctttcatcagagatcagcacttaataggcattgcatggtccacacaggagagaaaccgtacagatgtgagcagtgtggaaaaggctttattggtaggctagatttttataagcatcaggtggtccacacaggagaaaaaccatataattgtaaagaatgtgggaagagcttcagatggtcctcatgccttttgaaccatcagcgagtccacagtggagaaaaaagcttcaaatgtgaagaatgtggaaagggattttatacaaattcacaactgtcttcccatcagagatcccacagtggtgaaaagccatataaatgtgaggagtgtgggaagggctatgttactaagtttaatcttgacttgcaccagagggtccacacgggagagagaccttataattgtaaggaatgtgggaagaactttagccgggcctcaagtattttgaatcataagagactccactgccagaaaaaaccattcaaatgtgaggactgtggaaagaggcttgtacacaggacataccgtaaagaccagccgagagactatagtggggaaaacccatccaaatgtgaggattgtgggagacgctacaagaggcgcttgaatctggatatacttttatcattatttctaaatgacacataattgttcatatttatggggtacaacgtgctattttaatgtgtgcatacaatttatagtgatccaatcagtgtaattggtgtatctgttacctcaaacatttaccatttctttgtgttggaaaattcaaaatccatttgagaggagttggtagacagcaagggaagggtccctggagacccccagccaaacgggtcagtgtctcatccccacataacacaaaaagcagcctggggaagacaatcaagctacaggcactgataagggaactagcacaggggattgtgcctggagacatgcccatggctgcacagatagaagaacctccagcccattcaggtaaaaactcgcacaaacctccggctcactcagttaagggaacaagaccagacacagaaatgcctttgtcctttgtataatcagcaggctccgaggaaaaagtttcttcttttgtgggcatgaacacagtgggcttcagtaggttcaggttggcactttcttttgtggaaaaggaaaagcccagcctctgtaaatcatcacttcagctcctgattggtcccaggccaagctgaatagcccttaggaataatcacttcaactcctgattggtcccgggccaagctgaatagcccttatgaatcatcacttcggttcctgattggtcccgggccaaggtcccagaccaagctgaatcacgctttctccaagacagcccgcaggctaagtgcattccttccccttcccagtccataaaaaccccggaccccagcctcatactgggcaacttatttggatccccatctccactgtggagagcttttttctttcacttattaaacttttactccaatttcacccttgtgtctgtgcttcttaatcatattggacgtgagattaagaactccgggggataagagagactgttacagagagactgttacagtgtggtgcatttgtgagactacaacacatttttagcaatttgtaaataattgttgatgatagtcacctttagtgctgcagaacagtagaacttattcttcccctctacctcttttgtatctgttggccaacctttggccatctcacctacctcctacacttccttgcctgtctacatccactgttctactctctactacaaaatcaactttttttaacttccatatgagtgaggacagtcagtatttctctttctttgcttggcttatattaacaatgtccttgaaaactcatccatgttgccacaaatgataaaattttgtttccttgttatgtctaaagaggattccattgtgtatatatgccaccttttcttcattcatgtattgatagacacttaggtggattccttatcttgactattgtgagtagtgctacaatgaacctgggagtgcagatatctccgtgacatactaatttcctttcctttggatatacccagtaatagaattgctggatcacttgaattttattatgcttcagaagctccacacgggagagaaactacggaagtatgaggagggtggtatgtgcttcattcaggcctcaagtcttcaacttcagaatgtccacattggagagaagcctcagtaatgtgtgtaataaagtctttactcagttttcatgactacagtctcacctaagcattcacaaaggggagaaacattaaaatatgaggcacatagaaagcagttccttttgagtttgtatcttgtaatttatcacagaatccatgctgatgatacatttcatccagtcctgtaggagaaaaaacatttaagttaaagcctgtttcagccatagctcagcataccccagtggtcctgggactgtcacagtggagaacccttgtaagttgtgcagtagggcttcaaacaaaagtttgacagttacagttattcaggagacagaccttaagagttcattcatgcatttacaaaacgaatcatgaacatatcaaagttgattaccactagaatgtcagtgacatgtgttttctgctgcatcttcacaactttaacactgattatcactttgtgttcactatgtgttaaatgaattaaaaggagcaaacgcgatgtttttaaattgtatctaagagaggaaatctacaaataattcagggacacctgagttgaaatgcagagtacactaaatactgcagttcacagcattattttgataatatctgttcacacttggttcctgtcttcccctcctcctctattccgaagttgcattcttagtatttgtggctttgtgtagtgttccattggttgaatacaatataaattcaacaataatttgtaatttttctcacactacaggctgaaaacgttgtaataaattcaataaaacatcttaataaattcaaaagtttaataccataaaagtcttttccaattataatctagatcacaaaagctgaaattcaatcacatcatgaaaagtggaaaattcacaagtatgtggaaactaaacacactctttatatatatatgtgtatatatatgtatgtatatatatgtatatgtatgtgtatatatatgtatgtatatatatgtatatatgtatgtgtgtgtgtatatatatatatatatatatatatatatatatatatatatacccaccctgtgtccaagtgttctcattgttcaattcccacctatgagtgagaacatgcggtgtttggttttctgtccttgtgatagtttgctcagaatgatggtttccagcttcatccatgtccatacaaaggacatgaacccatcttttttaatggctgcatagtattccatggtgtatatgtgccacattttcttaatccagtctatcattggtggacatttgggttggttccaagtctttgctattgtgaatagtgccacaataaacatacgtgtgcatgcagcacactcttaaataatatgtcagagtacatcaggagtgaaattaggaaataccttagacaactgaaaatgaaaacaatggccaaaacttttggaatgaggcaaaagcagtaggaggagggaaatttatatctgtaaatgcttatattaaagaagaaagatctgacatccacagcctaattttattttcatgaactagaaaaggagaatcttacagaaagtgattaggagggaaataataaagattaaagtattaataaataaaatacagaagaagaatacaaagaaaatcaaccaaaccaagagttgattattctgaaagactaacaaaattgtgaaaactttagcaggactgactaaaaaagactcaagtaactaaaagtggggacattattacccatttttacagaggtgagccacagcgcccagcttcatttttgtataaggtgtaaggaaggggaccagtttcaatcttctgcatatggctagccagttatcccagcagcacttattgaatagggagtcctttccctgttgtttttgtcagtgtcatcaatggcatggtttggatgtgtccccacccaaatctcagcttgaattgtatctcccagaattcccacatgtgggagggacaccacagaaagtcagaattattaattaaaagggaaacagaactaagaattttaaaaattcacagcctatctactttggaaaaaaaaattagaaaacctgttctggataaaacaacggtagagataagcaactgatttaggagattagtttggattggtcatgtcaacagaagccaggacctgctgtccattaacactggaagaatgaccccaaaggcatctaggagatcatagaggctgctcctcccaacacagacccagagtgcacggacctgggaagcagaagggacctttgatgccaagtgcccctaaccttttaggctcagttccctgcatgctacgattgagtgtgtcaatacatcttatctttcgggaaggcagagtagatcaaggatacagctataactggcatatgaatagtgatcactcaattttcagagagcggatgtttggcatcaaaagtttggcacagtcaccttatttttgtgtctaaacaaaattttgaaaagtttttagtttagaaaaataggtaaacagtagactccattttttttaaaaagaagaatattggtttataggccaatgtatgtttatagggagaaaaaaagttaccttcaaaagagcaggtttttagatgaattgtttcctaatttagctttatactgttattattttttaaccaatgccagtttttaaattgctaactataataaagaaattatgtttcaccaagaaataagaagaaacttaaaaaaaaaaatctttaattattgaggtatctgttgcctaggctggagggcagtggtggcatcatagctcactgcagcctcaatcaaactcctgggcttcagcaatcctcccacctcagcctcctgagtacttggaacttgtagtcccaagatcaggccaccatgcctggccagttaaaaaaaaatttttatagagacgaagtctccctgtatttccctgtctggtctccaattcctgagctcaagggaacgtcctgccctggcctcccaaagggttggcattacaggtttgagccactgcgcttggccaggaagaaaactctttataagacatgctccttcacctatagaatcctcccgttttactgcatttacaatctcaatgtaagattgataccaatgcctagctcttcatcagtcattattgctctgaggtactgagcaattcactacattcgctgaaatttgatgtttctacatctaaggagaaatatgaataccatgaaaagtttatgggaagatagctattccatgacgacaccgcttctccactagtagctgtgatcttaaatgggggtggcttttcctgccaaaccagtggtcccacagcttctggagtaggggctggtgtcttcctgctcctcattgcccctgccaaaccattccacctggctcatcctttaaaccgttagttttaacctcccatcgtcagattatcctaatccttgaagattttatctcctcgtttgttctcttcccaataacactcctgtcatcgtgggaggcgtttagacttcaggaattcctgtctatacactattttcgctcaaagactcaggaagagagacggacgactcacagggtcacagtccacattccccaccaggcgctcagagatatggaatacgttcccggtgggcactgcggtgtgtgtagtcaaggaccaccgcggagtccaacgcttcccgctgaagagtgagattatagacattttcctttggcattggaggaagcggagtccagacacactctgagtcgcgggcaagttggctcaggcgggtggacgagtgaattctgggaactgtagtccatcaacttcatggaatggcggaccctttggctcaagcagttgaaccggggaattctgggaagtggagtccagacgctctgtggagacgcgagcacttccggtgtgtgagcctgcggttgctacataaccgcgtagtttgagccatttctgcgtctggcgggtccttctgaacttgtcaccttcgcttggggtcgcaacgacccgatgatcgatgatccaagcaagggaaaagaagccttggcggagagcggaggtttggtgggggcggggaatggggtttttttcccgtccacggaagctttctgggatgggggtgctgtgctcgcatcccgggggttggaattggcggggtcctctgtgccctgctgtgagcgtttccaggactttgacctcgctcagcctgcctctctccaccctacctgtgcgaccgctttctcgcagtgtgacgtggagtgttactcaatgtccttatactttccattgctgtttttggtaatggggacattagaaccatcctagtagaatcgtttttgggaactgaaagagataacgcaaatgagaaccttaaagcagtccctgtcacttggtgactggtggtctcttgttaacttcccgaagaggtcaggtccccgggtggagtcatagcttcagctgcaggggccctggtccttctccctaatccctgcaggacgctggatgatcccgggaggccttctgacctctttttaggaaagcgagttgcgtccgcttccacgaagggcggggagcatttaacttttatgggggaccgcgatgcagtcagggtatttcacaactttcgccttccccagcctgacctttctaaaagagctgcagggaggggacttcttggctactgagggcaaatctctatgtgattggtccttggcttttttcctttatagagatgttcacccaaccgagagtgtgtcctcgggaatgggtgttgataatcattaagccgtaattggtaacttcattctaagtgctttatacaaataaatttaggccacactgtggctctgtgaagtattgcttttctttgttttaaaaatgagagtgagacacagggtgcatagcagccaactagtgagaggtagagctggggttggcacctaggcagtccaggtcagagcctgagttgatcacctcttggatacattctcattgaggcagaggaactagctggactcgtagggaaagcaagttaggacctgattgaaaggacgttgagagcaaggctcgtgggcttggacgtctaggaatttttaaaaatttctcaactattttgtttcatgttttccaagtatttcgtactgttgtggaactgtatcattgtggaaaagtctgaaataggagaaatgagagtagaaaaagttttttaattacccatgtatccaagatgtaaaggtagtaactgttaagcttctaattgatttcttttgtctttctttgtgtctacttctatatttgttgataaacatttttttaaaaattgttatattttaatgtgttttcccatatgtcttttaactatagaaaattttaaatattgctaatagagactaaactagtgaggctggttgtggtggctcatgcctataatcccagcactttgggaggccaaggcaggtggatcacttgaggtcagtagtttgagaccagcctggccaacatggtgaaaccccatctctaccaaaaatacaaatattagccgggcgtgatggcacgtgcctgtagtcccagctactctagaggctgaggcaggagaattgcttaaacccgggaggtggaggttgcagtgagccaagatcacgccactgcactccagcctgggcaacagagtgagactcaaaaaaaaaaaaaaaaaaaagaataaactagtgaactgccatattatataatgctcaattttattatt[184 bp omitted]ctgggcatggtggcaggcagttgtggtcccagctactccagaggctgaggcaggagaaaggcgtgagcccgggaggcggagcttgcagtgagcgagatcgcgccactgcactccagcctgggctagggagcgagactctgtctcaaaaaaaaaaaaattaaaaactaaaaacaaaataaaatattttcatctttatatcatttaaaagctatagaaaagttgcaaaaatagtataaggagttctcatactctatccaaatttgccaattgtttacatttttcctggttgctttgttgatgaccatcagccaaataccaccaggaacataactaaccagagacagctgattatggctttctgcagcaaggaagcccacataccatggtaaatgtggggtgtgttggtaagaggtatttaagaagggatggtatagggtttcacataacatgctagataatattagatattaaataatattgttatctattacatatcagatctgttaaaagactactagtagttgtagtgttactcattagatagtgttgaatagcatattacctaacatcctgttatctaatctgtagttacatatttaaatttgttcagtttttcatttaaagtcctatgccaggcacagtggctcatgcctgtaatcccagcattttgggaggcaacggcgggtggatctcctgaggtcaggagttcgagaccagcctggccaacatggtgacaccttgtctctactaaaaatatttttaaaagccgggtgtggtggcatgctcctgtaatccctgctacttgggaggctaaggcaagagaatcacctgaacccagcaggcggaggttgcagtgagctgagatcgcgccactgcactccagcatgggtgacagagcgagactctgtctcaaaaaataaaaaaataaagtccttatgactgtgtcccctaccccacccttcacctgcaatgccattcaaagtccagtttatgcattgtctttagttgtcacattccacagtttctttagtctagaaagattccacagtctttgtcttttataaacatggtggttttttttttaataggaaagttattttggagaaagatgttcatttggagtttgatatatttcatgtttagtttcagattatgtattgttggtaaggatattgcacaagtgatgaggtttcctctttattgcaacataacagggttcacatgatgtggtttgtcccttcactggtgatctcaactgtgttcacttggccaagatgatgcctttcagatttgtccgctgtaaagttaccttttttaaaaaaactcaagtttcttattggaaggtacattattagtgggcattctactaaagatgaacttctagttctcttcatttattcatttgtttgttcaagtataaatctcccaacaatatggactcagaattcagtcttatgaaggtaaatgacatgtggattagcaattttttttcaactctattgaggtatattttacataaagcattcactcatttcaggagtacagtgatctttaggaactttgtaaagtggagtaaccatcatcataattcagtttagttatttttcaccctcagttggactctgtgcccatttacaattaaacctcattctcaccccaaatctggagcaaccactaacctacttttcctctatgtatacatttgcctattcggacatttcatataaatggaatcatctaatccatggattttggtgactggcttctttctcttatgatgtttccaaggtttgtgcatgttgtagcatgggttggtacttcattccttttaatttccaaattagattccattatatggatatgccatgatttttctatccatttacccagaggaaggcattttggttgtgcacagttttggggttagtatgaataatgctgctgtgatcattcataatacatgtgcttgttgctacacagcctccccagccaccatttcatgtctctcttttgctgtctctggcattttccaggcacaattccaccttcctttgtgctccattactcaagacactgaagactccaaaaagtagtaggaaaaatgaccacattcaaggtgagtagagctcacctctcttgctattaaaattccatcttattgctcatattgtcatatatttttctctgtcttgggaagactcaaggaggaaatgggcatttgggacctgttgtgtgccagttgcttcctttgtctcttttgtgttgactttgcatttggtttttggtttgggttttgttttgttttttactgttacattatggagtagaaaaattagtaggaatgaacagtgctcccacttcttcacctccttgctctcaaattagcctgatttttcttcttgtgctgttccttgtacattcataactgtatttgtattgatgatggagttccttatgtcaagagtgctctatacaccaagataacatgtccttctggttttcttcatacttgtccatcagatagttagtccccctttctgtggaggcccacattgcgcatgttggctccatttctcttagatgctccagggaccctctgacccacttcacccacctcctgagtcctctggccccaggaatgagctattatttaaggtgtcgcaatcagcggatcacacaccaagctcctgtgtttccgtattctgtccttctgtctcaatccatgcagccagctcacatctgtggaggggtggcctgtgtcccgcttatcattctgtcttctttataaatcatcaagctgctgtccagcctgcgcccccaggctgccatcacagcactgggccaattgcccaggatataagtgctccccctttgccagtccagagttctgtcaaattggaccctgctggctgcaccaattccatggaacaggttcactagttacagacttggcgagtctaccatgagagagcacactcatgtatgacaaattacataaagcagatttattacatgtaggtagcaagggacaacagaagcctatgatccactgtgagccagtcctccaaggcttaagaaagctgcctagagtgggtggagtcacgactgcacttgccccatttgcaccatagctgaggcaccccaagaggcagcctgtcccaggctatatgcctcaggggtaacatgacttactgagcagttcctctctaactcaagatattatcttttatggattggactagaaccaaagaaggcataaaaaaaaataaaaagatgttatcttccctgggaaggacactgcataactagcacatttatggttattcttgagacctataaacaagaaagtggggagaatggatccaaggctactttgaaaatagttacctaaaacctgttagtttggcaaatactaaagaaaagtgatagcatccagggtttgggtctgagagaggaggacaataagcctcatcaaacaaggttgagactgaattgctcattgttgctggggcaactggggcaattggcaaaattcattgaaacctatataggtgtagcccaggatgcaccatttgaaatcctaaggggttacttacaaggagactcagtaagtgcacaaagtaaaaatacaggaggtctttttcatgattgcacttctggtggagctcaggaaaatcactgtcaggatacagacagaatgagtgggaaatctataagttgacctccacttctcctctccgcctgctcaatgctgctcctcccccagtagtccatggtcataggattgaggttatgtatccttgatgttataggaggcagtgaccttcaaggatgtggctgtgttcttcactgaggaggaactggggctactggaccctgcccagaggaagctgtaccaagacgtgatgcttgagaacttcacgaacctgctgtcagtgggtgagcacaggcaccctctgtaatggtacatcaggcctcaggagtggctttgtatcctagagtattcaagtttgtgtatgcagtgggaacttaaatttccagtaaattttaccttgatattacctagaatgaattggtattaagcacatgactttgcatgttcacagggcatcaaccattccaccctttccacttcctaagggaagaaaagttttggatgatggagacagcaacccaaagagaaggaaattcaggtaagaagcaagcaactgtgtgtccttgtacatgactttctttcccatttgttttacttctgaccatgcccacttatatcaccctgatctaaattgcccaatctctttcctggtttattacaacccctttctggctggtggtcctgttccctcccttccaccctgacatctattttcccccgagcagccaaaatgatccttgggaaatgcaagtcagttttccactccttggtccaaaagcctttatggtttattaatgttattaaagttacaacctctttattggcttttagagaccctgaggtttgttcttcatcccctgctgcctcttgactacatctgtcctctcgcccttgcatcatcttttccagccacgttgtcctccctgctgttactctgtcctgtcatggacactgtattccctgttgctggtaacaaataacagacttcacagattaaacaacacttttgttctttctgacatggggaggacggtctcccacccctcaccctcgaaaggagtggccagccacaaccctaaatcatattgtttcactatccagagtgatccagagttggcaccctaacaaacaaagacactgtcctcccgcatgatatgtcaggatcctagagattacctctcagatgctgaggacaaagttctgacttctttttacttagggtaacttctatataaggatatacaacataaacacagatatataaactattgattttgttattgtttttccttaaatttccttttgatttatatttcactatgaacataatgttttaatttagtaatttatcatgcaagatttttgactgaccagaaaattccttagaaatagtaacaaattaaatgtatatattatatcagttttttaatggagtctgttatttccatcaaggattttacatatgagacatggtgtggttataaattggtcacatacaaaccagaaaacaagattcatggggaaaacataaactgaacattcattaaagttgaatgccatatcctaagtgtgaaatcttaaaaacaccaaacaaaggcttcatttgtccacatctcttcattctgtgtccttataggcggcaagactattgcggaagcaggaccacatgaagactgcccttgccagcaaatctgggaacaaactgcaagtgacttaacccagtctcaagactccatcataaataattctcacttctttgaacaaggtgatgtcccctcccaggttgaggcaggactatctataattcatacaggacagaaaccttcacagaatgggaagtgtaaacagtccttcagtgatgttgccatctttgatcctcctcagcagttccactcaggagagaagtctcatacatgcaatgagtgtggaaaaagcttctgttacatctcagctcttcgtattcaccagagagttcacttgagagagaaactctctaagtgtgacatgcgtggtaaggaattcagtcagagctcatgtctgcaaactcgtgagagagtccacactggagagaaaccattcaaatgtgagcaatgtgggaaaggcttcagatgtagagcgatacttcaagttcactgcaaattacacacaggagagaaaccttatatttgtgagaaatgtgggagggccttcattcacgatttccagcttcagaaacatcagataattcatactggggagaagccgttcaaatgtgaaatatgtggtaagagcttctgccttaggtcaagtcttaataggcattgcatggtccacacagcagagaaactgtacaaatctgaggagtgtggaaaaggcttcactgatagcctagatttgcataagcatcagataattcacacaggacagaaaccgtacaattgtaaagaatgtgggaagagcttcagatggtcctcatatcttttgatccatcagcgaatccacagtggagaaaaaccatacagatgtgaggagtgtgggaagggctacattagtaagtcaggtcttaacttgcaccagagggtccatactggagagagaccttataattgtaaggaatgtgggaagagctttagccgggcttcaagtattttgaatcataagaaactccactgccggaaaaaacccttcaaatgtgaggattgtggaaagaggcttgtacaccggtctttctgtaaagaccaacaaggagaccacaatggagaaaactcatccaaatgtgaggactgtgggaagcgctacaagaggcgcttgaatctggatataattttatcattatttttaaatgatatgtaagttgtacatatatatgggatatggtatgaaattttaatatgtgtatataatacgtaatgatcaaattgatgtaattagtgtattaccttaaacaattaacatttctttgttttgggaaaattcaaaatccattgttctagcgatttgaaaagaaacaataaattattgttgattatagtcacctttggtgctttagaacactagaatgtatttctcctatctagcagtacttatgtatcttgttacccaatctttggctatctcacctaacccctacacttccctgcttctagaaccactgttttactcactaattctatgaaatcaacttttttagcttccatatgtgtgtgaggacagttagtatttatcttaccttgcttagcttatattgtttaacatgtcctccaaagctcatctatgttgccacaaatgacacaattttgttttctttttatgcccaaagagtattctattgtgtatatatgccaccttttcttcatttatctattgatggacacataggtgggttccatatcttaactattgtgaagaatagtgctccaatgaacatggtagtgtagatatctgatccacatactgatttcctttgctttggatatactcaatagtgggattgctagatcactcgaatcttatgcctcagaggcttgacacaagagcaaaactatggaagtgtggctagggtgatatggcttcataccacctcaggcctcaagtcctcaactgcaccagagtgtccacgttggacagaatccttagtaatgaggtgtgtgataaagtctctgctcagttgtctataatctcatttgagagttcacaaaggggcaaaacattaaaaagaggcatatggtaagcacttcagtgtgtgtttatatcataatttatcacagtccatactgataatatatttcatccaggcttgtaggacagaaaacatttgtttaagttaaattcagtgtttcaccatagctcagcattctcccatcatcctaggaccatcgtagtagagaactcttgtaaattgtgcagtagggttgcaaacagaacttacgcttgtcattcaggagacaggccttagaataagagtttgttcacacatttacaaaaccctaatgatgaacatgtcaaaagtggtgaccactagaatgtcaactacaggtaccttgttttctgcatcctcaggaccttaacactgattagcacttacatgtttagtatgtgttaaatgactcaaaaggagaaaatatgatattttaaaattgcatctaggagagaaaatctacaaaaaataattcagggacacgagttaaaatgcagaatacactcagttctgcaatccaaagcattattttgggtaatcttaccctgttgcacttggctgctggcttcccctcatcctctgttctgaagtttactactagtggctttgtctaatgctccattggttgcatacaatataaattcaacaatcatttgtaactcttctcacactacaggctgaaaatggtttgttaacttgtcaataacagtccactgcatatatcacaattacatttttttcaacagtgttaaggcaaaatttatagtaatactttttacgtggcagatgtagttacgttggaaaaaacttccttagttctgaattctcatgattgcttctgtatttccatgcaggccttgatataatggccttctaattgtggtagcatttattttatcaaacaactcaggtagaagctatgccaatttgacaatttttggaaacctaacctaatattctcttcctatctctatgaaataccaagagaaacctatcggagtttggtaatttcatgaaatgtatccatgattggggtaggagtgacatttacatgctcttctttattgttggcagtaaaaataagtcttttgtaagcagtgtatatcagaatgtataaggtacaagtgttttacctggaaatgatgggataggaaattatgattatgatgttaaaactgtgaaaagtagaaaaccacatggatgatatcaccccattttaaaatggaataagtattcaacaagaatttgtgtgaaatgcatttattcctataacataagaccaataaaatgagggaaccagacatacagtaaaaggagaaaaacataatgtgagctttgtgaaatctgactgtaaccttcataacataatcaaatatctttgtgtgtttctgggactttttaatgtgtatatacgtaatttgtgaacaactattctttcctctggcaatgaatatttgctggtatttttccattttataattttatgcattttttctcagtgaacatcagttttatcaaagcagtaaatttagtgcaataaatttgcaaacttattaacgttaatcacttacctaccaggactcagaatctcagaataaaattgctctatattgtcatatgatgtaagttcacaatgactaggg[136 bp omitted]cggtgaaaccccatctctactaaaaacacaaaaaattatccaggtggtggcgggcgcctgtagtcccagctactcgggaggctgaggcaggagaatggtgtgaacccaggaggcagagcttgcagtgagctgagatcatgccactgcactccagcctgagcaacagagtgagactctgtctcaaaaatatatatatattctctggtttttagaatatgcagataaagtgatgaagtctggttaactgtcttggtaattaaagcatgtgatgcttctttagggataagtcagggagtgtgcaaatactggagatcctgcccagtgcccagacacagctgatttatcgagacagagaattcacaatagcgaaagaatttaatacacatagaactggctaaatgggagacaagggttttattattactcaaatcagcctccttgaaaatttggaggctagggtttttcatagatagtttgacaggcagggggctagggaatgggtgctgctggttggctggggatgtgaaaaatggtccttgtgcattaagtccacttctgggtgggggccacaggaccagttgagtcaagagtcatgggtttaggtggggccatctggttgtcagaaatgcagaagcctgaaaagacatctcaaaaggccagtcttaggttctacaatagtggtgttatttactggagtaactggggaatttgcaaattttaagacctctggaataacagctggaaatcagaataatgactggtaatcctttacacatatatcttagaattcaggcccctctcatcctcgtaaactagtggggcctttcaatagtattacaaaggcagtttagtttgggggaagggctattaccatttaaattataaactaaattcctccccaagttagctgggcccacgcccaggaattactaccaagggcagtttggtggttaaaagcaagatggagttggttagatgagatctcttgcactgtcataatgttctcactgttataatttttacaaaggtgatttcagagattgaaatagatatacatatgtgtgaaggttgtttgttttttgtcttttaaagcaacagatcttcacctgaggtcaggagttcgaaaccagcctggccaacacggtgaaaccctgtctctactaaaaatacaaaaataaccgagtgtggtggcacatgcctgtaatcgcagctactcaagaggctgaggtgggagaatcacttgaaactaggaggcagaggttgcagtgagccagatcacgtcattgcactccagcctgggtaacgagcaaaactccatctcaaaaaattaaaaaaaaacaaacagatcctttgaaaaccagaggtgtatgggcagggaacatagtatgacagcagcagagcttctgttgctatggatccagttagaacaaagacctggtttggatgccaattcagagttatataccatggtgttgacaaaaagagtcaaactctataaaatataaagaggtttattctgagccaaatatgagtaaccaaggcccatgacaaggccataaaaggtcctgagaacatgtgcccaaagtggttgggttatagcttggttttatacattttagggggacagaagttacaggcagatatcagtcaatacaggtatacattgatttggtctggaaaggcgggacaactcaaagttggccatggaggtgcttccaggtcttgggtgggttcaaagattttctcattggcagttggttcaaagagttatctaaaggcctggaatcaatagaaaggagtgtctggattatgagaaagggttgtggagaccaaggtttttattatgcaaatgaagactccatggtaaatggtaaatgtctcttatcagttgaaaacagtgccagactcttcagttaattctctcctagagagagacctgggaaaggaagaggaatgtagattttacaaaatgaatatactaagcatgctagattctaatgagattgctctgatttgacaatattaaaggttttcttaataaattgacttccaatcttatctttaatgtctgtagtactcttgtgcactgaatattatttttttcattaaacacttttctgtagatcctgaggaaaagatacaaaaaaaatttgaaaaactcaaaaggcagtttcctgctgatgaacatctgtgggataattgattttaatggatttatagtgcatagactatagtccctatttaatcaagcactaatatagacattgtgatggtattttgtagacattcagcccataatcagttggctttgagtagggatattatgctaaataagggtaggcctgatcaatcacatgaagatccttcagaatagagctgaagcttctctgaatgaaaaaaatattgcatcttctggtggcatcttcctctcatgggttagagtcccatcttcacctttctggtggccagccatatgcattttggaattgcttagtgatatggtttggctctgtgtccccacccaaatctcatgttgaattgtgatcctgagtgttggaggtggggcctggtgggaggtgattggattatgggggctgtttctaatgatttagcatctatccccctagtgctgtctttttatggaattctgatgagatctgcttgttttaaaagtgtgtagcacctcctcctgctctcattctctcctgctctgccatggtaagacatgcttgcttccctttcactttccatcatgattgtaaatttcctaaggcctcctagccacgcttcctgtacggcctgtagaactgtgagtcgattaaacctcttttcttcataaattacccagtctcaggtagttcttttttttttttttttttttgagatgcagtcttgctttgtcacccaggctggagtgcagtggcacgatctcggctcactgcaacttctgcctcccaggttcgagctattctcctgcctcagcctcccgagtagttgggattacagatgtgtgccaccatgcccagactaatttttgtattcttagtagaaacggggtttctactatgttggacaggttggtctcgaactcctgacctcaggcgatccacctgccttggcctcccaaagtactgggattacaggtgtgagctcactgcacccagccaggtagctctttatagcagtgtgagaacagactaatagacttagccagttccaccgtgccaaagtagagttccttgcaataattgcttgtatatgtcatactgattctgtttctctggttgaatgctgaccaaaagacattttgccccacaagaacttctagaggaagagcaccctaaggatgagttttctaaattgattgtgttttctagaattggatttctactcttactaaatttaagagcactattgactttatttccagtgcaacatagggaactggttgtgaaaggcatggtgtgataatatgccaaatatcatactgaataatcctaatcaaatgcctattggaatgattctggtgaccatgaatttgttagtttaggacacagtagacaaacttatcagtatagtagtattttctggatgctcctagttgggcttcagaaattaggaaagaaggctgggc[137 bp omitted]ggtggcacgcacctgtagtcccagctacttgggtggctgaggtaggagaatggcatgagcccgggaggcagagcttgctgtgagccgagattacgccactgcactccagcctgggtgacagagcgagactccatctcaaaaaaaaaaaaaaaaaaaaaaaaagaaggaaagaaaaagatgaggtcaatcactatgcagggcttaactatgccttgttgatcttggtattcacagtaaataaattgatgggaaatctatgatactgtcactgggtttgtgttgtcagaagagttctattgcaggggaagagaactctaactgcaaccacctaacacagtcacagccctcaaatcaattccaagacatgtccagtttacaaatccacattcatttacataaaggggaggccaatgttagatgagtatgggccctgatacatttcagagttctccataggaaaccatgggcataaacctgtgactgagtacataaaaggagaaataatcactcttttgggcaatgactgaatccttattgtcaaatggcacattgatatgatgatcagacatggtgaggagaaagtaggaactacactaggcatattagtaagacacatacatgacagaaaggaagaataaatcctataaatattcatgggccttccactttggtgaaatttccataggttcactgatgtgggactattgagatatcccttctaagatataggacaagtagcatatggtacttcctacaaccaaacaaagtgtcacaatgtctagtggccctccttggctgctggatgctacttatgcctcgctgggatatgctactctgcctttttttgtctgacccaaaaacattttgcctcaactaagataccataaggctgtgtaatgtatcctggctgccatgtaagtttctctacccctaagacactgtggaccaggagatccaaaagtaattgaaatatcagtgacagagagtgatgtttggagccactggctggtcacatttgatgaatcaaaccacagatggataggattttgtagcaaagcccagtcatcctctacatatacttactctttctctttttggtagagacagggccttgctttgttgcccaggctggtcttgaactcctggcatcaagagattctcattcttcagcctcacaaagcaatgagtacaggtatgagcccccacccccagcctacttactcttctttggaaaagcagcctatgattttgctagtggtcttagcagagacagagcacttaaccatgacctaccaaattagcatgcgtgccaagctttccatcatgaattgggtgttgttggcccttccttgtctttaaattgtatgtgcacatcggtattccatttgtaagtggtatatgtatgattgggtttgagcaggctctgaagccacagataagtgtatctaaggcccatgacccctactcctactatgttatcttcagaatgagtgaacatgaagacaagtcctatgaattattgtgtcacagcagcaaaaagaaatgaagtgattaaaagtaaacaaagcctaaaggaccacatgtgcattataggtgtcctgggtagagagaaagaaagccaagagagattacttatagaaataaaagctgaaaacttctcaaatatgaaaaacacatcattctgtaaatccaagaagctcaatgcatttcaagtaagataaacccaaaggtacccaactgagacatgttatttaaaaattgttggaaaccaaagacaagcgaaaaatttgacagcagcaagtccaaagtgacttgtcatgtacaaagaaatctttaatgaagatgtcagcagatttctcagcaaacatctgagactagctgatatattctttgctaaaaacacatacacaccatacatacacacacacgtctattgagaattcaacattcagccaaactgtccttcaaacttgagagataaatctatgtgaatgggtagacaatatgtatagacataatatatgacatcagttgtacaaagtggggagaaggagaagctgtgaatgagtagtgtttttgcacgtgattgaagttaagctggtatccatggaaaacagtttgctacaactttagaatgttacatgtagaatgttacatgtaagtccatgaatcagaaatgttacatgtttctaactacagatactaatgaaacatacacaaagggaaatgagaagagattcaaaatgtatcactacagagaaagaaatcaacatcaaggaaggcagtaatggaggatatgaggcaaaagagccagaagacatatagaaacaaataaaatggtaagaccttccctatgaataattgatttaccataaatgaattaaacaccctaaccaaaagatgtagtttggtaaaatgattgaaaaaaacagtatccaagtgtatgctctgcacaagggatttgctttagatctaataacatgcatagacttaaagtgaaatgatgggaaagtttttccatatcaatagtaacaaaaagacagaaagagtggcagaaaagagtggcagagacaaagaaaaactatataatgctaaagggtgattccaccaagaagatatagcagttataaacatatgtgcaccacacatcagagctccaaattacatgaagcaaatacagaattaaagagagaaataggcagctccccagtaatacagttgacccttgaaccacatggatttgaacttcacaggtccaattatatgtggatttttttttagtgaaacacacattgaaaatacaatattcataggatgtgaaaacctaatatatggagggccaactttttgtatgcacaggttccataaacttgagtatgtgtggattttggtatatacagagctcctggaaacaatcgcccctgtaaactgaggaacaactgtagtaggacacttcatacctcactttcttttttaaaatttgtacttttattttagatacagtgggtatacgtgcaggtttgttacatgggtatattgcaccaagatagtgagcatagtatccaataggtagtttttcaacacacgccccacaccctacatcccccctctactagttcacagtgactattgttcacatgtttatgtccatgtgtgctcaatatttagctcccacttataagtgagaacatgcagtatttggttttctgttcctatgttaattcacttaggattatgtcctccagctccatccacgttactgcgaaggacatgatttcaattctttttttatggttgcatagcattccatggtgcttaacatacaagtgcatgtgtctttcggtataataatctatttttctttgggtatatatccagtaataggattgctgggttgaattgtagttccattttaagttctttgagaaatctgcaaactgctttttacagtgactgaactaatttacattcctatcaacagtgtataagcattccctgttttctacagccttgccagctgttgttttttgacttaatagccattctgactgctgtgagatggtgtctcattgtggttttgatttgcagttgtctaaaatggttagagatgatgagcatcttttcatatgtttgttggctgtgtgtatttcttcttttgggaactgtctgttcatgtcctttgcctattttttaatggtgttatttggtttttgcttgttgatttgtttcagttccttatagatgctggatattagacctttgttggatgcatagtttgtgaatatcttctccatgctgtaggctgtctgttacagtttcttttgctgtgcagaagctctttagtttaattagttcccacttgtcaacttttacttttcttgtaactgcttttgggggacttagccaaaaattctttgccaatgctgatgtcgagaagggtattttctgttattttcttgtaggatttttgtagtttggggtcttatacttaaatcttgaatccatcttgtgttaatttttgtgtatagtgaaaggtaagggtctagtttcattcttctgcatatggctagccagttatcccagcaccatttattgaatagagagtcctttccctgttgcttgtttttgttgcctttgtcaaagatcagatagttgtaggtgtgtggctttatttctgagttttctattttgtttcattggtttatatgtctgtatttgtgccagtaccatactgttttggttactgtaggcttacagtagtcagaaggttgatagtgtgatgcctctagctttgttctttttggtgaggattgctttggttattcaggctctttttttggttccatatgaattttatgagaccaatgtgctgcctactccactaaggagtcaactccatatgaattttataatagttttttataattctgtgaggaatgacattgcatacctcactttcaaatagataagaagaccagacagaagataataatgaaataaaggacttgaaaaaccctacataccaattggacctaaaagacatatacagaatacctcatacaacaacaacaatagaatacacattttcttatttatacatgaaacactctccaggataggccatatattatgtcataaaactaaagttgacaagtgggaactaattaaactaaatttattgtcttaataaatttaaaactttagtaccataggaaatatttttttccaattataacctagccaaaaaaccctggaaatcaatagcagcatgaaaagtggaaaattcacaagtatgtggaaatgaaacaacacattcttaaataatctacatgtcagactaaattaaaagtaaaattagaaatatctggagagagctaaaaataaaagcaatgtgtcaaaattggtgggatgagaaaaaaagcagtaataggtgtgaaatttgtacctgtaaatacttaaattaaaaaagaagaaatatctcaaattcacaaccctattttacattcatgaactacaaaaaagaatctgaataagaaagctagtggaaggaaggaaataataaacattaaagcaatgatacatagagaatagaaaaaccaagaaaatcaatgaaaccaagagttggttattttcataagaaaattatgaaaacttcagtgagattgaataaaaaatgaagacagaaggctcaagaaactaaatcagaaacaagaggggacattattaccaatttttacagaaataaagatgattgtaatagaatactatatacaattgtatgccaagaatttgtataactagatgaaatagacaaattccttaaagcatacaccttaccaaatctgaattatgaagacaaaaaaatctgagtagacctctaactagtaaggagattgaatcagtaatccaaaacctcccaatgtagaaaagcccaggatcagatggcttcactggcaaacgcttcaacacatttaaggaacatttaacaccatagctgctcaacctcttcccaaaaatgcaagaagagagaacacttctttgatccttctgtcaggtcagtattaccctgatgccaaaccagaaaaagacaattcaataaaattatacaccaatatcccttatgaatactgatgcaagaattcaccagcaaaataccagcaagatccagcagcatattaaaaggattacacttagtgaccgaactgttttattcctggaaggcgaatataattatggttcaacatacaaatatcaatgtaatactccacatgagcagagtggaaggtataaatcacatcatgtcagtgaatgcagaacattcagtttcacaaaattcagcacctagcaccttttcatgattgaaataccaaataactagaaggagaataaactaccccagcaaaataaaggctatatatggaaattctcagagctgattgtcatactcaatggtgaaggactgaaagcttttcttctaatatcaggaacacaatgagttttctccacttttcccacatttagtcaatgtagtattggaagttctatgcagaacaattagatagaaaaagaaaataaagctattaaaattggaaacagaggtaaaattgtctatatgctaatgacatgttcttatatataaaaattctaaagaattcacaagaaaaaaaaactcttagagctagtaaagtcagaaagttgcaggaaaaatatctacatagaagaagcagttgtatttctatacaaaaacaattaatctgaaaaggaaaatagttccctttgcaatagcattaaataaataaattacttaggaactgtcttaaccaatgacaagaaacacttggacactgaattttgcaacatcttactaaagaaaattaaagaaggcaccccaggcatggtggcttatgcctgtaatcccagcactttgtgaggcccaggcaggcgaataacttgaggccaggagttcgagatcagcctggccaacctggtgaaacccctgtcttcactaaaaatacaaaaattggccaggtatggtggtacgtgcctgtaatcccagctacttgggaggctgaggcaggagaatcgcttgaactcaggaggcggagg[132 bp omitted]cgacttgatattgcaaggctgtcaatacctatatctatagattcaatgcaatccttaatcacagtaacatttttctcagaaatgaaaaaatccacctgagattcatgtgaaatatcaagggacactctctcccatggtcatattttagacctcgtcattttctagcaaatattcctccataataatttgcagcactactctccaacaactttgacttgtatttccaccttggtcccaccagcatgctagcatcagtaatattagaacctcgccaatacctacagtccactgagacgatcacctttttactctttcaactcctcgtgtactcacagcctgccaagcacatttcttgtcaggagaggacagctcacttctcctaatgtctcacttcccaaaattgtgtcccatgaaaatttctagctagatgaaggcagagaaagaaaatatttgatttcttaggctttatggaagcgataggaatggcaatagtggtttggaatggagactgcacgcaccagtcaacagggtgtgtcccgaataagcagtgggtaaaggacatttactgaaatgctatctccaactccacttcaggaaagcttgctgcagagttagagtgatatagtccaaatgctctgtttgagtcgcgggccctttgtctcacacgggcgagtccggggaattctgggaagtggagtccacacgctctgtggaggctcgagcacttccggtccccaactgtgacgttgctatttcatttaccacagtagtttgagtcatttccacatcttgcgagtccttccgaacgagtctcctttccttggggctcgcaaccacccaatgatcgattcaggagaaaagaagcctgggcggagagcagaggtttggaggggcgcgggcggggattgccgttccagtcagctgagccttctggcgtcggggggctctgctagggtctcagggagtgggattggcgcggcccggtgtgccctactttgacctcgcttagtccgcctccctcctccctacgtgtgcagcccctttcagtgtggtgtggagtgtcacttaatgtccgtttatcttccattgctggttcgtttgtttgtttgttttgtaacgggacttttcggaccatcctaatggattcattttgggacctgaaagaggtaacacaaatgagagccttaaaagcagtccctgtcactcggtgtctggtggtctcttgttaatttcccacgaagcctgtcaggtcctctggtggggtcagagctccagctgcaggggcgccggcccttctgcctgatccctgcaggacgctggatgatccctgacgccttctgacctctttttaggaaagtgaggggagcatttaacttttatgggggacggcaaaacggtcagggtgtttcacagctttctttttccccagcccgacctttctaaaagagctgcaggaagggacttcttggctactgatggcaaagctctacgtgagtgatccttggctttttttctttgacagagatgcttacctcaaccgagagtgtgtaggatttgtccctcgggcatgggtgtcgataatgattaagccttaattggtaactttattccaagtactttataccccaaaatacatgatcttcacagtggcactgtggagaggtgctgcttttttcattttaaagatgggcgtgagacacaggtggagcaggagttgaaacctaggcagtccaggttagagcctgagttgatcatctcttgaatgcaattctcattgaggcagaggtactagctgggaacaggtggagaacgtaagttaggacttgattgaaggcaccttgaggcaaggctcaggggcttggacttctataggagtttttgtttgtttgctttttgctttttaatttttttaaccttatctactattttctttctctctctctctctatatatatatatatttttttttttacagagtttcgctcttgttgcttaggctggagtgcagtggtgcaatcttggctcactgtaacctccgcctctcgggttcaagtgattctcctgcctcagtctcattttcgtcaaagggcccgcgactcaaacagagcatttggactatatcactctaactctgcagcaagctttcctgaagtggagttagagatagcatctcagtaaatgtcctttacccactatttattcaggacacaccctgttgactggtgtgtgcagtctccattccaaacccctattgcctaatcagtcattgtcaggacacaaacagaataagtaggaaatctataagctgacctatgtctctcaagatccaaaacaactttacacttgtcccttgtgccagtgcaatgctgctgtctcccaatagtctttggccgtaagattgaggtgacatctgcttgatgttgtaggaggcagtgaccttcaaggatgtggctgtgatcttcactgaggaggagctggggctgctggaccctgcccagaggaagctgtaccgagatgtgatgcttgagaacttcaggaacctgctctcagtgggtgaggacgggcaccccctgtaatggaatgtcaggccccaggagtggttttttaatcctagggttttcaagtttgagtgtgcagtgagaacctacatttccagtaaattttgcctggctattaggttggtgcaaaagtaattgtggtttttgtcattggaagtaatggtacactgcaattacgtttgcaccaacatgatattaccttgaacatgttgggattaagcatgtgactttgcctgttcacagggcatcaaccattccatggagatactttccacttcctaagggaagaaaagttttgggtgatggggacaacaagccaaagagaagggaatttgggtaagaaccaagcaattgtgtgtccctgcatgtgattcctgttacttctgtccatgcccatttccagcattttggggtaaatggccaaacctgtttcctggattattacagccttctccctgctgatgcccctgctcccacccttcccaccctgccatctgttcttacggtagccaaagtgatccgtaggaaacggaagtcacattgccattcctcagctcaaagcctttctggcttcttgtttttattagtgttacaacctctttaagtggcttttgtagaccctgtgatctgcccttcatcccacactgtctgactgcatctcctgtcctctcccccttgctccatcttttccaggcaccttgtcctccctgctgtttctctatcctgccaaggacattgtattgcctattgtggccggtgacataaaactcagcagactgaacaagaaacacttatctttctcttctgtaggcctgaagtctgacacatctcactgggcaaaaatcaagtggtcttagggctttgttcctttctggatgttcatggggagaagacttcattttggtttaccagtctctagtcactgtccacactccgtggctcttgtttcccttcctccatcttcaaaagcagctacattgcatccctgaccattcttccatagtcatgcttcctctgccactcttcttatgccttcctctttcacctttcaggtcccttgtgatagtattcatcactcctggatgattcaggatgaccctcccactttctgcttagctggctagtgacctcaatggcatctgtagctttaatctcccttgctgtggaacataacgtgttcataggttctgaggactggatgtagacatctttcaggaatgattattttctctactacaaaagcttctgcctccgagccctcacttgctcttctctctgattggaatacactgtccccacaaaacttactgacccctcttttagtttatgcagctctctgctcagttttaatatcatgggagaggtcgtctccaagcaccttattgaaaatactatcctatctttactcttcttggcctgcctgtgttgtgtctcatgtatttttgtctactgataagtcgcccctcccctttgcaatgtaatctcttgaaggcatttatctgtttctttatgactgcatcttcagcacctagaatactcctggtacatggcagttatctgtaaatatttggtattcttatgaatgaattaatggatgagaggacttgactgtctgtaagaatcatggagatagctaataagtaacagacatacaagagtgaatgttatatagtcatgccttggtagccgtggggtttgattccaggacccccttgtggataccaaaagccaaggatgctcaagtcccttctacatgtaaagtatttgtgtatatcctacacacaccctttcatatactttaagtcatgtctatattaggtataacaccaaacgcaatgcctacccatcgctttattcacatggattcaatgtataggactcaatgtgagaaattcaagttttgctttgtggaactctgtggaattttttttttccaaatacttctgatgcactgttggttgaatccatgtatgctgaacccacagatatagaggctgactatatgttgcaggacagttgttggtttgttttgttttgtttttttttttttttttttttttgtctgtgcagggctgcttatccaattttgactttcttaggttctcttgacatggttggttttctgtgtgtgcagttgacccacatcccatggaaactttcaagcatggttttcatgaccacattgagaaacatgccttccctggggcttacccttgagctttccttaaggaccgtgtttatgtctgtgagaaattctttatatctatgagctgaatgttgcttatatttccaaatgtttttcttcaaaaaatgtgtctatttctgcatctttatacaaatttaattgtcaaaaatgtgaaggaatatagattttactgaaatctttctttatatttatagagatatagtgttgtattttcatctggtgaactttatgacctgaaaggaattgggaaactgctctcaaaatagaaacctcccgaaggatactctcccttctctttaaagacttatttatacgtgacagcatattaaatatatccatgtactactgtgtactgaaaggtacatacttatcaattaatattttccaagattctttccattggaaaaacttggaagttatctttccattggaaaaatgtacctaattcaggacttggtaatatcctgacaaagttctaaacattttgtgagcattagccatagtaagaaacatatctgtcagtgtaacacggacaaacatttttcatgtgtgtagatgtgtgtgagtggctttagtaagcaattcatgtaatgacatttttcctgcttgtcataatgctgcaataattttcattctagttcttgttttgtaaatgtttattgcaggttttaactttatttcagctcattgaggcatagtcttgagtataaaaagttataaagcctgtttacctcatagactttcttttcattccacgtgtttctgaacaactttgattgtctgatcaggagcatccccctttgtgaacccctggaaggacagcctttcagattcccctcagaactacagttgtctgtccctgtactctttcagataaccaagttacttactatccatatcaaaacagaaaaataagattaagtatttttatacatgtgtaaaattattgtgggggaatactttgaaggtatagatattaaacactctgaggtgtttggtgttaacattgtgaagagttcaaccaactacgaagtttagtgggacgttttacagaggactgctctcacttcacatcaagtgaaaattcggcagcttttcaaaactatcttcatgtttagtaatttgctagaaagactcttagaattcactgaatgcttttatcctcacagttactgattcttacagggaaaacatgcatattatagttaaccaagagagaaactaaataagacagagtccagggaagtaccaaatccttattttctattgtattctcccagtggagtggggtatgttacattgtcaggattagcatgtgacttagacacagataactcccaatcaggggaacttacctgagtgctggggtccagagtaattactggggctccaatttcatagccatgattggttggttgattcccatgtggttgtttagtctcctggttcactgattccctgtgaggtaaagcccttccatgaatcacactgatgttctttctgatgtgaggagtatcaccccccatgccccaaaggagtggccagtcacaaccctaaataatattgtttcactatccagagttacccaggttttaccctcaagcaaagagactctcctcaggcatgacacttcaagatcctagagattacctctcagatgctgacgacaacgtcctgacctctttcaagttaggttaacttctttgtaaggatgtataacagacaaatatacaaactgtttattcgttattgcttctccttaaagttcctttggattcatatttcactacatatgtagtattttagctttataacttaccacacaaaattttagactgactaaaaaattcactagaaatagcaacaagtgaaatgtatatattaattttttaaataagtattttatttctatccagaattttacatatgagacatggtgtggttctaaattggtctcatgcaaaccaaaaaccagggtgcacttggaaaacagaaaaatgaacgttcattaaagttaaatcccacatcctaagtgtgaagtcttgaaaacactgaacaaagacttcacttgtccacatgtcttatttggtgtttttgttcgtttgtttgtttctgtttttgttttgttttgttttgttttgagacggagtctcactctgttgcccaggctggagtgcaatggcctgatcttggctcactacaacctctgcctcctggatttaagcgattctcctgcctcagcctcctgagtagttgggattacaggtgtgtgccaccacacccggctaatttttgtgtttttagtagaga[139 bp omitted]cttataggaggcaagatccaaactgagatggagactgttccagaagcaggaacacatgaagaattttcctgcaagcaaatttgggaacaaattgcaagtgacttaaccaggtctcaagataccaccataagtaactctcagttatttgaacaagatgacaacccctcccagattaaagcaagactatctacagttcacacaagagaaaaacctttccagggtgaaaattgtaaacagttcttcagtgatgtttccttctttgatcttcctcagcagttatattcaggagagaagtctcatacctgtgatgagtgtggaaaaagcttctgttacatctcagcccttcatattcatcagagggtccacatgggagtgaaatgctataagtgtgatgtgtgtggtaaggaatttagtcagagctcacgtctgcaaactcatcaaagagtccacactggagagaaaccattcaaatgtgagcagtgtgggaaaggcttcagatgtagatcagcacttaaagttcattgcaaattacacatgagagagaaaccttataattgtgagaaatgtgggaaggctttcatgcacaatttccagcttcagaaacatcacagaattcatactggggagaagccattcaaatgtgaaatatgtggtaagagcttctgtcttaggtcaagtcttaataggcattgcatggtccacacagcagagaaactgtacaaatctgaaaagtatggaagaggtttcattgataggctagatttgcataagcatcagatgattcatatgggacagaaaccatataattgtaaagaatgtgggaagagcttcaaatggtcctcatatcttttggtccatcaacgagtccacactggagaaaagccatacaaatgtgaggagtgtgggaagggctacattagtaagtcaggtcttgacttccaccatagaacccacacgggagagagatcttataactgtgataactgcgggaagagctttagacatgcttctagtattttgaatcataagaaactccactgccaaagaaagccattgaaatgtgaagactgtggaaagaggcttgtatgccggtcatactgtaaagaccaacaaagagaccacagtggagaaaacccatccaaatgtgaggactgtgggaagcgctacaagaggcgcttgaatctggatataattttatcattatttttaaatgacatataagttatacatatttatggagtgtgaaatttgatacatgtatataatgtgtgctgattaaatcagtttaatttcacctgaaacattatttgtgttggaaaaaattgaaaatctgttttttggatttgaaaacaagttactgttggttatagtcacctttagtgctatagaacaatagaagtgaagtagtgaggagtttgtttgtttgtttgtttgtttgttttgagacggagtgtcactctgtcgcccaggctggagtgcagtggcgtgatcttggctcactgcaccctccatctcctgggttcaggccattctcctgcctcagcctcctgagtagctgggactacaggcacccgccacca[131 bp omitted]aataaagttacaggatcaagggccagggtgccagagagaggaaaagagagggagagagagatttttcttgggactggaacctgaacaaacttagtccaggggaggggtgcagtccatcccactgcttgccaggttgatcaggcctgcaaagtcaaccttttcaatttgactttgaatagaaatcctgcatggatttctattcaggtgactcggatcagtaagacagggaaactttccactcattcctcttggatgtctattcaggcaacacaagccagtaaggattaggaaaggagaggcaaagcaccctgagtaagaaaaaagataggaagaggaaaagagagaaagaaaaaagggaagggattgactgggcatggtggcttatgcctgtagtcccagcactttgagaggccaaggtgggcagattgcttgagtctaggagttcaagaccagtgtgggcaacatgaggaaaccctgtctctaaaaaaacacaaaaattagccgggcatggtggcacatgcctgtagtatcagctacttaggaggttgaggaaggaggatcatttgagcctgggaggcagaggttgcagtgagctaagatcacatcactgcactctagcctgggtgacagagtgagaccctgtctcaaaagaaaaaaaaaaaagaaaatcattggccggtagggtgacgtggccccaatccctgttggactgaacaaaggaggatgaacgcgggaataaagataaagacaaaagagtatattcggaagaaggggtcaggaggctccttgcttctagtgaacaagggccctgagcttctagctccctttgtatttattgagcaaaggagatagagagaaggaggtggttgtcagtcagctgcttgactcagtgcaggcctggatgactgcattccctgaacagtagtctccagatattctagtagataacctcaaggagcacggcaccagggagtgattgaactcagcataccttctggtggcaggtacagatatgagtttgcccacatcctgcattcatgataaacagtgtgttgtttgatcatatagcctcactggactgctgagttggtcacgatcctccggctttcggctctctacagtagaggcagaggcaaggtccatgaggctggagaaagccaaccattgtggtaacactgaatcaaaagttcagtcaggtgattttcaatcatgaagaaatcttgtccagcagtcctgtcagctcacatgtctacccctcagggagagaaaggccccccatgtcccatgatcctagacaaatccccaaagaatatgccaccaaccacaggttcctgggctctgcaatagaaattgaaatgagactgaaagggttttcccagacaagccttcactggagcttatgcctggacataaggaaggcggcacaagagagaatttcctgactcccttcaaagagctcataggattgtttatttggcaaagcgtgggaattaacatcagggatagggtttgaaggctgggctgggaaaagcacatgactggtagggcatgcaggtcagcattacctggttgcaatgcttatcttgtgtactgggccacctggtggtctgggtggtggcaacaaggctgtaaatcaattgtttagcatttcatcctgaagggagacactctacaactttggttatcacccaaggccagttcctggaattcttagcagtgaggtagaggtgtgggttttgtgatcattgggaatgcatgaaagaacgctctagtcggggtgaactgaagccaagccctgtctctactctgtcaatagaactcagaagagttctactgcaagtgaagaaaagggtgactggaatcacctaacagagtcacagccccaaaatcaaatccaagacatgtccagtttacaaatccacattcatttacatgaaagggaggccaatactggatgagaatagatcctaccacatttcagagttctccacaggaaactatggccatgaacctgtgtgactatgtactcaaaaggagaaataatcactctttttgacaatgactgaatccttattgtcaaatggcacattaatgtgatgattggacctggtgagaaaaaagtagaaagtaatctagacatgtttgtaagacacatgcatatcagaaggacagaataagtcctataaatattcataggacttccacctcagtgaaatttccatgagttcactgatgcaaaactattgagatattccttctaggacaagcgtggtggtcatgcctgtaatcccagcactttgggaggccaaggcgggagatcacttgaggtaaggagtttaagaccagcctggccaacatgatgaaaccccatctttactaaaaatacaaaaattaactgggcatggtggtgggtgccagtaatcccagctctttgggaacctgagaaaggagaatcacttgaacccaagaggcggagattgcagtgagccaagattgcaccactgcactccggtctcggtgacagagtgagactgtctcaaaaaaataaataaagatattctttctaatctaaggtgtagggcaagtagcatgtgatgcttcctaaaaccaaaaaaagtgtcccaatgcccagtggccctgctcagctgttggaggctacttattcttcactgtggtgtactactctgctttttatgagtgacctgaaatcattttgcctcagttgagacaaggttgtgcaatatgtgccagctgtcatataagcttctcttccactagggtcctatgatccaggagacccacaagtgactgaaatatcagaaacagatagtgatgtttggagagagtggctggccacaactgatgaatcaaagcacaaacacatagaattttgtagcgaagccctgaaatcctctacgtatgtttactctctctctctcttttttttttttttgtacagatggggtctcactttgttgcccaggctggtcttgaactcctggcatcaagcagtcctcccacttagtaaagacagagcacttaaccatgggctaccaaattagcatgtgagccaaggtttccattatgaattgggtgtagttggccactccatatctttaaattgtatgtgcacattggtattccacttggaagtggtatatatgagattgggttggagcgggtcctgaagccacaggtaagtgcccctaaggcccattgttcctactcctgctacagtaccatcagaatgagtgaacatgaagataagtcataggaaattattgtgtctcagaagcaaaaaaaaaaaaaaaaagaaaaagaaatgagtaaaaatacacaaaacccaaggcaccatatatgcattataggtgtcctaggaggagacagaaaaagtcaaagagagctttacagaaataaaggctgaaaacttctcaaatatgaagaacacattattctgtaaatccaagctcaatgaatttcacataagataaaatcaaagagacccaattgagacatattgttaaaaattattggaggacaaagacaaatgaaaattttgacagcagcaagtccaaaatgacttgtcatgtacaaagaatcttcaataagatgtcagcagattttcagcaaacatctgaagacagatgatgtattctctgctgaaaaaaccaaaaacacacagttgtctactgagaaatcaatattcagcaaaactatccttcaaacatgagagataaattaatacttttctaaagaaacaaaagccaagagagtccattaccggaagacaatttatatgagaagttataaagggatgccatcaagttgaagtgaaaggatgctagacagcaacttgaaaccatatgaaaacataaatatctaaagtaaataaaattacatgaatgatgtaaaactcactatttttgtaatttgagtttttactccactttttattttgtacactatgtaataggaaaatgcattaaaatgattgtaaatctatgtgaatgggtacacaatatgtatagttgcaatacatgataccagtcacataacatgaagggaagcagaagttgtgaaggagtagcgtttttgcatgtgactgaagttaagttggtatcaattttaaatagatggttataactttagaccatagcatgtagaatgttatgtttcttcaaataaagaacatatcagtgagacacacaaagggaaatgagaagagtttcaaaatgtatcactacagaaaaaggactcaacataaaggaaggcagtaatggaggaaattaggggcaaaaggcagtaagacatttaaaaaataacaaaatggtaagacctttcctacaaataatgagtttagtgtaaatgagtgaaactcctcaaccaaaagatgttcactggcaaaaccattgaaaaaaacagtatccaagtgtatgctctgcacaagggatatgcttaaatctaatgatgtgcatagattgaaacggaaaggatggaaaaagttattccatataaatagtaataaaaagagagcaacggtggctttactaagggctaaattagactttaagtgaaaaattgttagaagagaccaagaagaacattatatattactaaaaggatgatttcaccaagaagatataacaattataaacatatgtgcaccaaacatcagagctcctaattatatgaagcaaatacagaattgaagagagaagtagctacccaataatacagttgactgtgagccacatggatttgaactgcataggtacacttacgtgtgaacttttttcaaccaaactcagattgaaaatacaatattcatgggatgtgaaacccacatatatgaagggccaaatttttatatacattggttctacagggctgaccgcaagacttgagtatgtatgcattttgatatacccacatatactaagggtcaactgtactaggacacttcatacctcacttgcaaatagccagaccaaagatatgtaagaaaaacaaacaaacaaagataagtaaggaaatagaggatttgaagaatattatacacaaaattgacctaaaacacatatacggaataacccacacaacaacaacagaatatacattttctcatttgcacatggaatattctccaggatagctatatattaggccacgaatcaagtgttaataaattttaaattttaatataataaaatacattttttccaattacaatctagatcacaaaaactagaaatgatagcagcaagaaaagtgaaaattcacaagtatgtggagactaaacacattcttaaataacctatatgtcagagtaaattagaagtgaacttaaaaaatatatggagaccattgaaattaaaaacaacgtgccaaaatttattggatgaggtaaaagcagtagtaggtgggaaatttgtacctgtaaatgcttatattaaagaaagaaatatcttaaattcacaacctaattttatattcatgaactacaaaaaggcaaagaatttgaaccagaaagctagtagaaggaaagaaagaataccgattaatgcaatgacaaatggagaatagaaaaacagaaaattaaccaaaccaagagttggttattccagaagattaagaaacttgagaaacctatagttagattgactaaaaaatagagaagcctcaagaagcaaaatttacacacaaaaatatgaactttactgcaaattttagagaaataaaaatgattataacagagcactatctttaattgtatgccaacaaattgtacaacctagataaaatagacaaatctcttaaaacatataccctaccaaaaatgaatcatgaagacagaaaatctgagtagatccttaactagtaaggagattgaatcagtaacccagtgcctcccaacaaagaaagcccaaaattaggtggctccactggttaattcttgcatttaaaaaaaaaattatttttatttttagtaacccttattttacttagtaagaattattccaaacatttaaggaacacttaacaccataactcctcaacctcttcccaaataggcaagaggagggaacacttcctagttccttctctgaggccaggattaccatggtaccaaaccagacaaagacattgcatgaaaattatacatcaacatcccatatgaatactgatgcaagactctaccataaaataccagcaaaattcagcagcatattaaaaggattatactcaatgaccaaacatttattcctggaatgcaaatataatttatgactcaacatacaaatattaatgtattatgctgcatgaacagattgaaagatataaaaatataatccacatgatcatgtcagtgaatgcagaaaattcatttaacaaaattcacactttcatgattaaaataccactcaactaaaaagaaaagaaactatctcaacaaaataaaggctagatgtggaaaatttcaagagcttattttcttattcaatagtgaaggactgcaagctctttttctaatatcaggaacacaatgaatttgctccacttttccacctctagtcaacatagtattggaagttctaggcagaacaattaggtagaaaaaggaaataaacctgttaaaattggaaacacataaaactgtgtctacatgctgatgacatgttcttataagttctacagaatacacaagaaaaaaacctcttagagctaacaaagtcaaaaagttgctggaaaaatacctgtatagaagaagtagtttgtatttctgcacaaaaaaacaatctgaaaggaaaatacttatcttgacaatagcatcaaaaagaaacaattacttaggaactgtcataaccaaggacaagagaagcacttgaacactgagctctgaaacatattactgaaggaaattaaaagaggcacaaataaatggagatatatccattattaatgagttgagagataaattacaaggcagtaaataccacctaaaatggtctacagattcactgcaatccttaacgtaatcacaatgattttttttcagaaatggaaaaatccacccaagattcatgtgaaatatcaagggatgctctcttccatggtcataacctaaacattgtcatttcctagaaaatactcttcggtaataatttgcagcactagtccgcaacaactttcatctgtattgccacctgagtcccatcagcatacttgcatcgataatcttagtacctcgccaatacctacaatccactgaggctatcacctttttgctctcttaatcccttatgtcctcacagcatctcttgtcaggagaggactgctcacttccttttctatcttacttcccagaatatgtcccatgaaaatctctagctagacaaaggcagagaaagagaatatttgattttttaggctttatggaagagaaaggaatggcaataggggtttggagtagaccctgcaagcactagtcagtagggcgtatcctgaataaatagtgggtaaaggacatttgtggtgatgctctgtccaattccacttcaggaaagcctgccacagagttagtcagagtgatgttttattagaataatgctgacctccatgtttttgatttttgaattattctcacactttggaattaaggaatttctcattacaaattatgctttagatactttgtgtataattatgctcttggtttctaagcattgctgtcaggttatacagggcagtgagtagacatatctgtgaagcattaactctgggcattgtggtgagtgtaatggtagaagtattttcaatgtgttgtgagggaagggaatataccaattcatgataggtgagtgggctattggtataagtgaaagaaggtccagctgcttatctcttatagaaaaaagccaaaataacaacaggaaagtgtgataaaaagagtgaattttattacttgttgctagcaagggaaagagtgattggaatcttttccaaaagttgccacttttcaatttctggagagagggccacagtttaagaagtgggcttggaatgcagagaggtaagggggtttaggaggtacctgatggcatgtctcgctctgatgatcttgaattattgttgcatctggtgaaggggccagcacgatcatgggctcaatcaggttataaattaatggactgtcaatcttgcagttcatctgtagccaggaggagagaattccagagctgcctgatcctcatcagtattcttcccctgaagcttctaaggaaatatgtgagcagataagtgagcgcggtgtgagcttaacaagcatcctggtaaataaatgtgtatagggcatggaagcataaggtgggaaaaagaagggagtggagttttaaagcagatttggaggctgtatttcaacacgaaagaaaacacatctgtagtttgtctcaaagctacgtcttgagactggggagaagtgggaaagaaaagacggtctttaaaatgtagtttgaagctaaggtgcttggttacacaggccccaaaatactattaggccaaccagtccaaccttgcttaaacttgagtaatgattcaaatatcataaaatgcatcactttaaaatatatcctttagtggttttttagtaaattcccaaagttgtgcaactgtcactactctctaatttcaggttttttaaatcggcccagaaagaaatcccctatccattggcagtcactcccaatcctcatcctttctccactagctcctggcaaccattattctactttctgtttctacagatttgcccattctgaatatttcatgtaaatgaaatcatacaacatgagctctcttctgaatcacatctcttagctttcatttctcttggtgtatacttaggagtgaaattgggtaataagctgtattagtctgttttcccactgctataaagtactacccgagactgggtaatttataaagaaaagagatttaattgactcacagttccaaggattgacaggaagtatgactgggaggcctcaggaaacttacaatcatggtggaaggtgaaggagaagaaacattagaacagaaaagagagagcaaaggggaaatgccacacacttccaaacaaccagatttcatgagaactcactcactatcatgagaatagcaaggggaggtggaggttgctatgagctgagatggcgccattgcactccagcctgagcggcagagcgagactctgtcttaaaaaaaaaaaaaaaaaaaaaaaaaagacattccttagaaaagcagggattgataataatcagttgtgttatctttttgtagtgaaataatttgaaattcacaggaaattgcaagggaagtacagagaaaccccgagtcttccatctacattcttaattacattttacattttacataattttagtaaaatatcaaaaccaggaattcaacattggtacaatgtgtgtgtataccacttttatttgtcgtatttcatgtagatttaatggaatcaccaaggcagtgatgatacagaaagaactattccatcaccacaaagatctctcttgaagtatccctttatagtcaacccaacttgtgtccctaccattcattacccctagcaactactcatctgatgtccatctctacattttgtcattttgggaatgacatatagatggaatcatgtattatgtactttttcagattgtctttttactcagcataacaccctttagctcaacttgtccagccagtggcacacatgcagcccaggacggctttgaatgtggcccaccacaaatttgtaagctttttaaaaacatcatgagatttttttttttttgctattttctttttagctcatcacctatcattaatcttagtgtattttatttaatgctgtgagtatctgtttctgtgttcaaataccatccataactcttcttaagtgaattgggtctttgtgttttttgctccttttcttcttagactattttatggttgagttgtgagagttgtttatatattgtagatataaatttttcgtcagatatgagatctgcaaacactgacaaagctctaggtactgacagttttcctacactgtcttcttaaaattttatgattttacattgatatttcacatttaaatctatgatccaatttgacttaattttgaaataaagtctcagattctttttcttttatgcacatggatgttcagttttcccagcagtctttgatgaaaacactgtcccatttctatttatttgctttagcattttggcacaaatcattttgttatagttggttagggtcatttctgggttatctattgtgttccactgatccgtgtgtctatactcagagaatattactctgccttggttaatgtagatatataataactcttgacattattagagtgattcctcccactttattcttcttttgcaaagttgttttaggtgatctagttcctttgccttttgatatgaattttttatctattaaaaaaacttgctggccagggtgtggtggctcacacctgtagtcccagcactttgggaggccaaggcaggcagatcacctgatgtcgggagttcgagactagcttgaccaacatggcgaaaccccgcctctactaaaaatacaaaattagccgggcgtggtggcgcgtgcctgtaatcccagctactcgggaggctgaggcaggagaatcgcttgaacctgggaggtggaggctgcagtgagccgagatggcgccattgcactccagcctgggcaacaagagtgaaactccatttcaaaaaaacaaaataaaacaaaacaaaacaaaaaacaaaaaaacaacttgctgtgattttgatagtaattatcaaaaagctgtgcatccattgggagagaattgacatttttactatgttcagtttcacaatctattaatatagaatatctctccatctatttcatgttgtttaatttttttcatagtgctgtaattttcaacttgcaacctgtgtaattcttttgtcagatttatacctgaatatttaatttattttggtttccatgtgtttattgctattataaagaaatacaatggattttggtatgttggtcatgtatcctatgatcatcctgaattcacctactatctaggagctgaggggataggaagacttcacattgtaaagatgacactactacccagagaattatacacttttcatagaatctttatcaaaatcccaacagccttttgtgtagaaatagaaaagccaataccgaaattcatatgtaattgcaatggccacaaatggaaaaatcaatcttgataaaaatgaacaaagtggataacttgcactttctgatttcaaaacttttaccaagctatagtaatcaaaacaattgttttatctatttaaaaagattctagcatacaaagttgttctagcatacaaagatatatatatatatatatatggagagagagagagactaatgggctaaaattgagagtccataacaaaacccataaatctaaggccactttattttcaggaaacattcaagattactttatggagatagaatagcagccgatactgctgggacgctgatacatggacatacaggataatgaagttaggttcgtacctcacactatacttaaaaattaactcagaatccgtaagtgacctaaatttaagagcttaaactataaaactcttagaaataagcatagagataaatcttcctgactttttatttggaatggattcttcaaagagacaacgtgagcagaagctaataaaaaatacataaattggacttcagtttttaaaaattctgtgcatggatatacatggtcaagaacacaaaaagaccatgcagcatgggttctagtatcccgaatataaaaagaattcttataacgcaatgaaaaaagttgaa[136 bp omitted]ctgtctctactaaaaatacaaaatttactggatgtggtggcgcatgcctgtagtcccagctactcaggaggctgaggcaggagaatcacttgaacccaggaggcagaggttgcagtgagccaagattgcgccactgcactccagcctggcgacagagcaagactccatctcaaaaaaaaaaaaaaaaaatgggcaaaggacatacatgggcatttccagtatacaagtgaccaataaagggctcgacaccattagtcatgaggaaaatgcaaatcaaaccaacaataatataccactgacaaccactgtgctagctatcattcccaaaaatagaaaataatacatgttggagagactgtggagaaattacaaccttcacacattgaaggtgggaacataaaatggggcaatttttctggaaaactgttttgtgatcctcaacatagaattaccctattaatcatatctataattcatataatttcatatctaggtatttacccaaaggaactgaaagcaggtaatggaataaatatgcgtataggaatgtttgtagtagcactattcacagcagccaaaaggtggaaagaaccaaatgttaccagtagatcaatggataagcaaaatgtagtataagcacagaataaaatattattcctgtataaaaggaaattatgtactgatacatgctgtgatgcagatgaactttaaaaacattatgctaaatgaaaagggtcagaaacaaagatcccatactgtgtgattccatttatatacaatgactaaaacagataattaaataggatagaaagatttgtgtttgccagggataggggtatggccaatgtgagtgactgtttagtggggatggagttttctttgggtgatgaaatggtttagaacttaagaggtcgtggttttgtatttgtacgaggtacccttgccattaaattatatatttttaaatggttaattttattttttgtaaattacacttaaagaaaacttatttaaaataataaagactatgttcaaaatatctggcatagccaaaaaacctagaagcacagtcagagaaaactcaaactatttttttaagaaaacatttggaagatatgttaatattgtaaatgtataaataatacttaaaattaaggagaaaagaccaaaaacacaatagaagatgggacaagagatttgtacagtttccaaaaaatataataatggtccttgaaaatatgcaaagatgaggtgcagcaaaccaccatggcacatatacctatgtaacaaacctgcatgttcagcacatgtatcccacaacttaaagtaaaataaagaataattattattattataataaatgtcataacattttagagggggaaagaaaattagagattatcttatacaacttggttattttacaaatgacaaagctgtgtttctaattctttaacttgtgaataaatgtgatgaataaatgtggaaaaaaaggaatataggcctgactgtgacatttacagggttcagggcaagaatacaaatggaggcctacctaccatatgccttgatatttaagtgtacaaagcaagctaataacatgtaaaataaaatatgttctacccttataaaaaaagaaaatatgcaaagatattccatgatatttacaaaaaaaaatacaaattaaaactacatttagttaccatttcttaccattagattgggaaaactttaaaaacatcaaaataccacattctgttagctagtgtcaaggcaagacattcctcatacattgcttctggaaatgaaaaatagtataaaatataaaggcaatttgacaatatgcaacaaaatacacttctattcccattttggccctgaaatcctactttttgaaatgtacccttaacatatatcatcaacagggagaaaatatatatgtatgagtttatgtatcatggcattgtttgtagtaataaaatattggaaaccactgaaatgcccatgaatgggtgcagtattgaataaagcacacaatggagtttgtggagttgtgaaaagcatgtactctatatgaagtgattttccaggatatattgttgagtgaccatagaaggtttagatgaatgctaccttttgtttaagtaaacagcgaaaataagaaatctacatgttttctgtaaaaactggtaatgataaaccagaaaataatgaaattggttacacatgggtattaggagtcaacactgtggaagtggtgcggtggaaaggaggggagtgagtggcacttttctgagaataacattttgtatagtatagacttatgggaatatgttattgattgacataataatataaaatcaagaatggagataaaccaggaaacttaaaatcaaagaataacagactaacctaaatgcattcaaatcaataacacagactaaagatgaaagcaagaagtcatttaagtaccatattaaacacagtacagtattttgagtatatgtcctcagcataaagacaaaaagaactgtaatgatgttgaactctagttagctgagttatttttacaataatatgacttagtaattatgaaactacctgatgcaatggtttaaatgtttgtggaccactaaaattcacatgtttaattccttacccccaataagatggttttaggaggtagagcctttggagggtgattagattatgagggcagaactcttattaatgggatgagtccctttgtaaaagagacctgaggaaacttgttcatcacttccaccatttgaggacattgcaacaaggtgccacctatgaaccagaaagcagccccacttcagacataaaatctcccagtgccttgattgtgaggaataagtttctgttgcttataagccagctagcccatggttttttgtgactaagaatattggtattgagaagtgggattgctgttgtaacaaatatctaaaaatgtggaagtatctttgtgactgtataatgggtagaggctgggagacttctgaaatgcatgctaggaaaaacctacattgtcatgattggactgttaaagacaattctggttagggctcagaaggacagaatgagagctagagaaagcatcagtcttcttagagtaaacctatgtggtcacgatcagaatgttgatagaaatatggacagtaaaggccattatgatgagacctcagtcagaaatgtggaacatgttactggaaactgaagaaagcggggttcttgttataaaggggtaaataatttggctgaattatattcaggtcctagtgttttttggtaggtagaacttgtgagcaatgtaattgaatatttagctgacactatttcttaacaatgtgttgaagttgcatcttgaataatcttgactacctatagtaaaatgtagaaagtgagaagtgactgaaagccggaattactaattaaaaggtaaagagaactaaatacttttaaaatttgcagcttatctactttggaaaacatgcaaaaccctgtcctggagaaaacaagggtgtggctgaacaactgatttatgagattagtatggattgaccatgttgactcaaaccaggacctattgtccaagacaatggaagaatgaccccagaagtatttcacagatcttggaggctgctcctcccatcagaggcccagagcacagggacgtgggcaacagcagggacctttgatgccaggtgccgcctaacatctcaggctcagctccttgcatacactaccactgagagtatcaataaattttatcttttgtgaatgcagagtagagtaaggatacagctgtaattggtataggaatagccatcactcaattttcaagggggcattgaaaatttgtttggcactatgtggttgctcagtcaccttaatttttgtccaaaccaaactgtgaaacgtcagccaggtgcagtggctcacacctgtaatcccagcactttgggaggccaaggtgggcagatcacgaggtcaggagattgagaccatcctggctaacacagtgaaacccccatctctactaaaaatacaaaaaattagccaggcgtagtggcacatgcctgtagtcccagctacttgggaggctgaggcaggagaatcacttgaacccaggaagcagaggttgcagtgagccgagatcgcgcactgcactctggcctgggcaaaacagcaagactctgtatcaaaaaaaaattgtgaacagtctttttttaatttttttttatttttttttactttaggaaaatggatacaggacattagactctttttaaaaagaaaaatataggtcgacaggtcaatgtatgtttatttgggaggacaaaaaatatggtttatcttcaaaagagaattttagatgaattgtttcctgatttagctttatactattattaatgtctttcaactaacatatgccagttttcaaattgtttcctataatgaagatattttaaccaagaaatggaaaggaagaaactcttaataataaatcatgctccgtcacctatagaatcttctccagttttatggcattgaatcagacattgggtgtcagattgataccaatgccaagctcttcaacagttatacttgctttaagatacttagcaattcactaacttctctgaaatttagcgtttctacatctaaagtagaaatattactaccatgagaatgttaaatgtagcttttccatgaggacacagcttctccattggtggctggaattttgtttttcctgtcaaaccagtggtaccacagcatctggactagggctgtaactgagaaccaccatttttctaagagacagcttatttatttctctctcttttctcattcccttagttccccacttcctatgtagccctttaaaaatgcaaatatagacttttacctccccttcaccagacacttcctacagggaaagttcatctaactgtgtgctccaagccagaactctcctccagaattaacagtcaatttacaaactaaagcatgctggcctctgaactctcactcaccaggaggttgcctgaagagacaacagttgaaagcgtgcctgctactctctcccttctggttacaacttatttctgcccatgaaaaagccagctcaactgcctaatagataaggcaccaagccagcacacagaccccttccctcttcctcccctaccttttaaaagtgcctgctttctgctctaaaagccaagccgtgcacttaaagacaacacctgtgctacttcccctacgctagctctagaataaatcactttctttataccagatctccctcttgttaactggacgttgcaaacgggaagccactgatctacttttcagttacaggggctgatgctttcctggcttctcattgcccctcccaacccattctacctggctcattctttaaaccagtggtccccaaccgttttagcaccatggaccggttttgtggaagacaatttttccacggactggggaatggtttcgggatgaaactgttccacctcagccattagattctcataaggagcgcctgacctagatccttcgcacgcacagttcacaataggatccgcgctcctatgagaatgtaatgctgggctgatctcacaggaggtggagctcaggccataatgctccctcacctgccgctcacttcctgctgtgccgcccggttcctaacagtcagtggaccggtacaggtctgtggccctggagttggatatccttgctttaaaccctgagcctcctttcagccatctgacggctcaacagtcactctatctagctccttgaatattgtatctcctcgcttgttccctgtccaagaacactcctgtcaatcatgggagacatttagacttcataaattctttctattcaatattttcgctcgaggactctgggaaggacaactgtcagggtaacagtctgcattccccaccaggaacctggggctatgaaattcgttccccgtgggtgttgcgggaagtgtaatcgaggagcaccatgtagtcgcaacacttgagcctaaagggtgaggtgatggacattttccttttgcatctgaggctctgcagtccagacaccttgcgggattcctgatacttcagctcaggtaggcgtttccggagaattctgggaagagtagtccattttacgggaagtgtagtccactggctcgtggaacactgggtattttggctctggcaggtgaaccgttgaattctgggaacgatagtccagacactctgcggagtcccgggccctttggctcaggggggcgggtccggggaattctggggagtggagtccagacactctggcgcagagaggacacttccggtctcctagtctgaggttcctgctttaatgaccggggtagtttgagccatttctgcgtcttgcaggacattttgaacgaaccccctttgcttgaggctcgcaaccacccgatgatcgatgatcgtctcaggggaaaagaagccttggcgaagagcagaggtttagaggtgcgagggcggggagggtgtttattgttcccgtcagcggagccttctggcgtcggggggctttgctcgcctcccggggggtgggattggggtggccttgtgtgccctgctctgagggtttccaggactttgacctcgctcagtccgcctccctacgtatgcagtgtgtacactctttctcgcagtgtgatgtggaatgttaatgtctctgtacttcccattgctgttctttaaaatggtgcttatagggtcatcctaatagaattgttttgcgaattgaaagagataatacaaatgaaagccttaaagttgtccctgtcacttggtgagtggtctcttgttgcctgatattttaaaacgtttgatatcatttcaaagctatagaaaaattgcaaaaacagtataagaaattctcatataccctttacccaaatttgccaagtgtttacatttttcctgtttgctttgttgatgaccatcaaccaaataccaccaggaacatacctgtaaccagagacagctgattggtagctttctgcagcaaggaagcccacataccacggtaattgtggggtgtcttggtaagaggcatttaggaagggctggttatagggtttcacataacatggtagataatattggatattatgttaaataatactgttaccgattacatgtcagatagatgtgttaaaagaatactagtatttgtagtgtacttactagatagtgttggatagcatattacctagcatcatgttatctaatctgcagttccatatacgaatttgttaaatttttcatttaaagtccttatgactgtcctctgccccacccttcacctattcaaagtccagtttatgcgttgtctttagctgtcacatttccatagttgttcatttggagtttgatattgaagggggcctgcctctccacacctgtgggtgtttctcacaaggtggaaatgagaaactgagaaaagaaataagacacagacacaaagtatagaggaagaaaagtgggcccaggggaccggcgctcagcaaatgaggacctgtaccggcactggtctctgagttccctcagtatttattgatcactatctctactatcttggtgagggggatgtggaaggactatagggtaatggtggggagagggtcagccggaaaacatgtgagcaaaggactctgtcataaataagtttaaggaaaggagttgtgcctggatgtgcacataggccagatttatgtgtgactttacacaaacatctcagtgcagtaaagaccagtattgccgccagtatgtctcacctccagccataaggcggttttctcctatctcagtaaatagaatgtacgattgggttttataccgagacattccattcccagggatgagcaggagacagatgccttcctcttacctcaactgcaaagaggccttcctctttcactaatcctcctcagcacagaccccttatgggtgtcgggctgggggacggtcaggtctttcccttcccacgaggccatctctcaggctgtctcagtgggtggaaaccttggacaatgcccaggctttcttgggcagaggtccctgtggccttccgcagtgtatggtgtccctggttaatcgagactggagaatggcaatgacttttaccaagcatactgcctgcaaacacatttttaccaaagcacatcctgcacagccctaaatccattaaaccttgagtcaatacaacacatgtttctgcgagcacagggttggggctagggttacagattaacagcatctcaaggcagaagaatttttcttagtacagatcaaaatggagtttctcatgtcttcctttttctacgtagacacagtaacagcctgatctctttttctttcccctacagatatatttcacatttaggtttagattatacattgttggtggggattccacaggagtgttaagatgcccttttctttttttttttttttgtttgagacagttttgctcttgtcacccaggctggggtacaatggtgcaataggatgcccttttcattgtaacataacaaggtccaagtgatgttcgtttgtcccttcattggtgatctcagctttgtcactggccaagaagatgtctttcagatttttccactcttatgttacttttttttaaattatgaagtttcttatgggaaaatacattattagtgggcattttcttgtaaaaaagagcttccatttctcctctattggttcattgatttgttcaactataaatattctatcaatgtggactcagaatccagtcttattgattctaatgatatgtgcattaacagttttttttttaaactctaggtttattttagttatagcattcacccatttcaggtatacaagtcagttcagtggtctttaggaactttgaagtggggtaatcatcatcataattcagccgagatcactttcatcccccagttggactcctcatgcccatttactttgaacctcattctcaactcaaatttagaacaactgctaacctactttctattctattctacttgtctattccagacatttcatataaatggaatcgtagggtctgtgggtttttgtgacttgcttctttcatttactgtaatgttttcaaggttcacgggtgttgttgcatgggtcagtatttcattcctttacatttccaaataagattccattgtatgaatatgccacaatttttctgtccctttacctgtaggagagctttttggttgtgtgcaatttggggttagtatgaataatgctgctgtgagcgttcatgtgctaattgacaatatgagtccttgttggtgggtgacatccctggccaccctttcatgtctctttttctgtcttcatggcactttccaggcacaattctgctttccctggaactgtgtcattcaggactctgcaaattccctaaagtaggaggaaaaatgaccatgtccaaggtaagtaggacttgcctctcttactgttaaaattccatctcactactcagattgttgtgtgtttttctctgccctgggaagactcaaggagaacagcaggactttgaggatctcttgtcacctggctaatttttgtagtattagtggagatggggt[131 bp omitted]gtaatactgggctgggtgcagtggctcacactggtaatcccagcactttgggaggctgaggcaggcggatcacctgaggtcaggagttcgagaccagtctgaccaacatggagaaaccccatctctactaaaaatacaaaattaactgggcatggtggtacatgcctgtaatcccagctactcggtaggctgaagcacgagaatcacttcaaaccgggaggcggaggttgcagtgagctgagattgggccattgcactccagcctgggcaacaagagtgaaactctgtctcaaaaaagaaaacaaaacaaaaaaagtctagtaatactgaagattggccagtcacttgtgtactgtcactcatttacttctcaaagcagcagaatgaggaggttcctgatctcttctcctaaactcatgaaatatgagaaacctgctcaaaatcagaggcaatcaaggaacaggaatgttagccattctgctcaagtgaaagagagagacgagaagaaagaaaaattctccactgagggtctggtgacctgttgtgtggatgtctggagtgctcccttgagtgatgacatccataggtggcgctgcttctccctgtcctgcgttggtgtgacctcttcttttccagacctggcacctactcaggtgtactcattgttccaagtacccaaggacagtgattaccacagctgttcttatctccaaattcctccttatggcacaagatacctcacacattttttctttggctgggcgcggtggctcacacctgtaatcccagcactttttcggaggctgaggcaggtggatcactaggtcaggagatagagaccatcctggctaatatggtgaaaccccgtctgtactaaaaatacaaaaaaaaaaaaaaaaaaaaaattagccgggcgtggtgcgggcgcctgtagtcccagctactcggcaggctgaggcaggagaatggcgtgaacccaggaggcggagcttgcagtgagccgagatcgcgccactgcactccagcctgagtgacagagtgagactctgtctcaaaaaaaaaaaaaaaatccctaaattcctccttatggcataaaatgcctcaccattttttttttttttttttttttttttgagatagagtctctctctgttgcctaggctg[133 bp omitted]ttttagtagagacggggtttcaccgtgttagccaggatggtctcgatctgacctcatgatctgcctgcctcggcctcccaaagtgctgggattacaagcgtgaaccaccgtgcccggcccgcctcacacattgttaccagaaaaaatgacaacctggggcaaaaatatttaccccttggatagttaaggaagaataaatccagaataagaatcttctaaaaggataaagaaaaaagttcaaacagattggaacaaagaatactaaaaggcaattgtaaaagaagaaatagagatcgccaataatcttgaaaagtggtgatactcatttataataataagtgagaatgatagaatgaattgttcttcctaatcagattacaaaaccatgggaatatttataaactgctcttggctatcataaggagaattagggtacttgtattctgttgaatgattagagaggtagggaaaaaagtgagaagaaagtatgcaattatataatgataatattaaatgtgcttatttttcacattttaattttcatatgaaattattttaaatgagacagagtcagatgttcttacatcttactacttaccatatcatcttggccggactgataatggaaaatatgtgaaattaaatatttattatttagtgtagctaaaaatagatcatcagttccctggaatactatggaaccctgaaatagataatggtaataacagtaataagtaataccagctaatgttcattaaacagtctgtgccgtagacttttcaaaataccgtatatttcttttcttaattcttgaaaaaactcttgtcatgtaagaactattattcagagagggaacaagccttgtaggaaaacatgtctgaggtcacatggttagaaatgggcagactctcagaatgtgcactgaggcattctggcttctgatcaggacactaaatgctgcaataagcatatgtggtttgtgccttgcgagtacagaagacacactgcataactgtctcagggtaccatggagcaggttcactgtgcactgattaccaactcgtgtgagtcctgtgggacagaacacattcacacgcaacagattgcatgaagcagatttattactacagattggcagcaggcgagcccagaagcctagggtccagtatgagctggccatccagggctcaagaaagctacctggagcagatggaatcttgactgtatgtgccccacttgcaccagagctgaggcaccccagaaggtaacctgcccccatttatatacttcagggtgccatgactcatggagaaaaacttgaaggtcatcttccttccaggtgagagaggaacaaagcccagactgtcaaaggcagttcctccccataatattgcattcttagaataatctacagttattcttgagaactacaagcaataaaggggagagagctgggtggggtctgcaccccaactgtcctgcagtccatcccctgacccagatatccctcttagcaaactggtccatttcatatgtccatcgacctcccctggcctcccctgatcttgttagatcagtgtaacaccttgactgacacaatctctgccaacttcatggaattatagctggaatacattccgtggaccccagaggagcatgaccacaagcagcacagccagaccttcctgaagtagtaatcctgcccaggtcccagttatcaaaataagaagctgctgaagataccaaagaagaatcattcaggtggccccagtgtctgaagccagtggacctgcttctgggttgcctctcattgagtttttacaatagctatgtatccagagaaggccggaggtgttggcagttgcagacccactcctcccagtagggctaaaagcacagagcacttgtgttttttgaaccttcctgagggagtgaagggatgttgctgggctcccaaggcagtggccgtggaataaacagtatctatcggccattgcctatggcaggtgtctcatcatttttcatgggaattcacttgtaggtgtaggacataaatctggagctagctgcacctccaggcaggtccccagtcagcctggggcacagctttagccttcttgcccagtggtgcatctcgcttccagggtgacatctaggggcacccccagcatgcctaatgtttgggatctaacagtctgccagctttccaggcatgacattgcccaccctgtatctgggtcaccctccaaaccaaccacagagaaagccataaggctcaggtgcacacagcacccattcccttgtttgggtgttctgtgacccatttgtgggaatggggacattatcttttgccagccacatctcatttttggcacagttgcataaggtcagttcccccagtatgacattcatgcggcccttacagagaggaataccactcatccagtcctggttttcattatgtggaacatttctcatccaggtaatcaaaggaacatggtgcgagaaagcacagtccactgtagctttgttgaggttgtgtgattctgctgccttacaccagttaccacagggccctccagctctctctcatgtggcaggtgccaggttctgacgtgacaagccagggttatggagctgttggtgtgcactgtggcatgaaggatgctggtgtggtttaccatagtcaggatgagagggtcactgtggttggtgatagaataaatgcagggtagcagatggaacacttagccaggtgacatgaggtgactgcagcttgagataaggaatgtgctgtgcttccaggcctctgctgccatatccttgggggaacagcagattaatagctgttggatagtgggtgggctgaggtggtgcagcgacccagtctgtctgtccctgtcctgaggctactaccattgtagacatccattcccctggttgtttggctcagaccttcctgcctcagttgttcagtcaggaagggacgtcacgtcctatacaaaaaatgcctgctagtgccagccacccaaatgggatcaggtgtccccagtaccatcagaaggaccctggtgacccctatggtattccgtggtctcattcttcaccactgtgggatcccatagaagtcaggggatgttcaggaaagcatcacctccagattagagtcaggaggacctttgtcagttaccgcggtgatctgaaccgcaaattaccaacaggatgtgcattataaaggggaaaaggaaaaataattattgggaatactgagattggggtttcacagccacagcctcatcaaccggctgccaggtcgggcagatactgactgaattgctcactgtcgctgggactattagcaaggttcattgaaacctatatacgtgtagcccagtatgcagcatttagactcctagggggctacatacaagtaaactcaatgagttcactaaataagaccacaagacttctttgtcgttggacttctgatgacgcttgggacaatcaaggtgtgtcattgtcaggacacagactagaatgaatgggaattctataagttgacctacatctctgaagatcctgaaaaactttccatttttcctcttggcctcctcaatgttccttctctcccagtaaccattggtagtgagattgaggttgcatatgtttgatgctgtaggaggcagtgaccttcaaggatgtggcagtggtcttcactgaggaggagctggggctgctggaccttgcccagaggaagctgtatcgagatgtgatgctggagaacttcaggaacctgctgtcagtgggtgaggacaggcatcttctataagggaatgtcaggccccaggagtggttttgtatcctagggtgttcaagtttgagtgtgcagtgggaacctaaatttccaataagtgttaccgtgatattatctagaatatgttgggattaagcatgtgacttttcctgtttacagggcatcaaccattccaccgagatactttccactttctaagggaggaaaagttttggatgatggatatagcaacccaaagggaagggaattcaggtaagaagcacgcaactgtgtgtccttgtttgtgacttccatctgttttacttctgtgcacgtccaactccattaccttcttctaaatggccaaacatctttgctggattatgataacctccttccagctagtggccctgctccgtgccttcccactctgacatctgttctcctcatggcagctaaagtgatccttaggacatggatgtcagattgtcattcctcagcttaagagcctttctgtcttcttaattttatgaaagcctctttaagttgcttctagaaacccctgtggtctactcttcatttttcactgcttcttgactacatctcccatactctccctcattctccatcttttctggccaccttgtcatccctcttatttctccatcctgccaaggacactgtatcacctgttgctggtacccaatgaccacgaacttagatgattaaataagaagcatttattatttctctgttctttaggcctgaagtctgacacatctcactgggaaaaaatcaagctgtcttagggctttgttcctttctggatgttcatggggagaaggcttcactttgttttaccagtccctagacactgtccacactccgtggctctagtttccattcctccatctttgaaggcagctacattgcatccttgaccattcttccagagtcatgctccctctgccactcttcttatgcctatgtctttcacctttcaggtcccttgtggttgtattcatcactcctgtatgatccaagttgactttcctactttctgcttagctgattagtgacttcaatgacatctgcagccttaatctgccttgctgtgtaatgtgtcagaatcataggtcctgaaggctggatgtggacatctttcaggaacaattatgttccctaccacagaagcttctgcctcagggccctcacttgcttttctctctgactggagtcctctgttcccacaaaacttactgaccccctctgttagtttatgcaggtgtctgctgagttttaatgtcatggaagaggtcatcttcaagcaccctattgaaaataccatcctatctttacttggcctgcaagtattatgtgtcatatgcttttgtttactgatagatcacctgttccctttcaaatataatctctacaaggtgtttatctgtttgtttatgactgcatcttcagtgcctagaatagtcctagtacatggagggatctgtaaatatttggtatcctgatgaatgaattaatggatggggggacttcactgtctgtaggaatcatggagctagctaataagtaatacatgaaccagagtgtatgaaatatattagtcccttggaagccataggggtttgatttcaggaccccacatggataccgaaagccagagatgttcaagttcctgatatatgtgaagtctttgcctataacctatgtacatcctcccatatactttaaatcatgtctagaccagttataataccaaatgcaatgcctacctgtcacttcattcacaaggattcaacataggactcagtgtgtgagaaattccagttttgctctttggaactggaatttttttccctaaatattttttatgtcctgttggttgaatccatggatgccaaacccatggatatggagggctgattatatattgcagaacagattttttttttctctgtggatggctgcttatccattttcaactttcttaggtttccttgacatgattggttttatgtgtgtgcagttgacccatgtcctgtggaaacttctaagcatagcattttttttttcatgaccacactgagtaatatgccttccctgggacctaccctggagctttccatagggagcatatttatatctgagaagaaagtctttttgaatgaggatttgcagctagctttcctttgagagatttacccatctgcagcccatttgccttttccaaagtcggcccacacttcactgcctccagttcctccttccttcccttagagggggaagaatgaggatgagaggacacaagttatgtagctgaatgttgactctgtttctggtcatctttcttcaaaaatgtgcgtatttcccttttctttacattatgcaaatttaattgtcaaaaagttaaaggacaggctttttgtttatttttatagatttagtgctatattttgaactagtaagctttatgacctggaaggaattggggaattacttactcaaaatagaaacatcctgagaccccttcccatctccttaaagacctcttatttataagtcacagtgtattaaatatatccatgtacctattagacaggattgttcccttgaccatctttgcgggcaggaacttcagggtttgtttcactcagcccaccgctgtcgattccttgcaggagggagtgtgcaagcgagcaagtgcaggaaccggagcaaatgaatgctggaattggctggtcgctcctctctggcgagagcaggctctgttatgcacgccccacagcagtgtccaagcatgttacaacccatgctgtttcagctctgccatctggggatggccaagtgccaatcagctcagtggagcatcagggtagcagcccctgccctcttggcacctgggttcttgtccagcatccaggaagaaccaggtcacatgaactgtgtgaaaggtgatgaacgcagaagactttattgagtggtgagtggttctcagcagaaaaggaggctggaaaggggctgggaaggggatcaacatgttcctgaagccaggccatttgtggctgggcccctctccaaagcagcaccttctgaagttagccacatctatccatactttccgacactcagttgcttctctgctcaccgctcagcgacttgtatccttgccactcagctgcttgtgttgctctgccagctgaaatcttttatggtcacaggatagtggcaggcaggccaaaaaaagcaacattggggcagaaaaatggggtcatctgttttcacttagggctgaggttctaggcttaagggtggagtttggctaggtatactgatgggtacccacttacctattaatattttccaagtttcaacctttggaacttaactctccatcagaaaaatttacctaattcaggacttggtaatatcctgacaaagttttgaacattttgtgagcatgaaccataataagaaacacctctttcagtataacctggacagttttcatgcatgtaggtgtatgtgagtgactttagctgacatttcatgtaacgacacctttcctgcttgtctccacactgtgataattttcattctggctcctttctataaatgtctattgaaggttttaactttatttcagctcactgatgtgtagtcttgaatataaaaacagttaaaaaggcctgtttatctacatcataggctttcttttcattccaagtgattcttcacatcattgattgtctgatgaagagcatcctcctttgtggacctctggaaggacagcctttcagattcccctcagaactgcagttgtctgtctctgtactctttcagataaccaacttatcatccatatcaaaacagaaaaataagattaagtattttatatgtgtcatgcaaaattcttgtataggaatactttcgatttgtagatataaacattctaaggtgtttgatgtttagtatcatgaagggttaaactaaaaagtttaatgggacattttacagagaactgctctcacttcactccaagtgcaaattcggcagtttttcaaaactaccttcacattcaataatttcctagaaagaccctcagaactcactggatgtatttattctcacagttactgatttttacaagcaaaagatgcatattatagttaaccaagggggaaaaaccaaataagacagagtccagtgaagtaccaaatgtggatctcctattgtattctcacagtagagtcgggcatgttacatacccaaaattagcatgtgacttagacacaaggaaccaccaatcagggaaactcaactgagtgctgggatccaagtaattattggggctccattacatagccataattggttggttgattcctgtgtggttatttagtcttttggtccactggttccctgtgacctaaagacctacattaaatcacatcgttattttttctgacatggggaatgccacctgccatttcccatcccccaaagctgtggctagtcacaaccctaaattatattatttcactgtcaagagttacccaagatttgcccccaagcaaacagagagactctcctcaggcatgccccttcaagattctacagattacctctcagatactgaggacaaagtcctgacctctttttagttaggttaactccttttcttatttttaaaaatgttttttaagccatcttaaactgaaaggaaggttaacttctttataaggatatataatatacaggcaaatatacgaagtatttattatgttactgctttcccttagagttccttttgattcatatttcattacgtacataatagtttagtaatttatcatgtaaaatttcagactgagttggaaattttaaaaacagtaacaggttaaatgtatgtgtcatattaattttttattaaaccttttatttctatcaatgattttttatttgaaatgtggtatgtttttttctttcttttcttttttttttttttttttgaggcagagtctcactgtgtcgcccaggctggagtgcagtggcacgatctcggcttgctgcaacctgcgcctcctgggttcaagcaattctcctgcctcagcctcccaagtatctgggattataggtgtgtgccaccacacctagctgatttttgtatttttaatagagacggggtttcactatgttggtcaggctggtcccgaattcctgacctcaagtgatctgcctgcctcagcttcccaaagtgccttggtctcccaaagtgctgggattatgggtgtgagccaccgtccccagtgacatggtatggttttagattactctcatgcaaaccagaaaccagggtgcacttggaaaacacaaactgaacattcgttgaagtttcataccatgtcctaagtgtgaactcttaaaaacactgaacagggcatagcttgtcctgatctcttaattttgtattctgataggaggcaagatccaacctgagatgaagacttttccagaagcaggaccacatgaagggtggtcctgccagcagatctgggaagaaattgcaagtgatttaaccaggcctcaagactctaccataaagagctctcagttctttgaacagggtgatgcccactcccaggttgaggaaggactatctataatgcacacaggacagaaaccttccaattgtgggaagtgtaaacaatccttcagtgatatgtccatctttgatcttcctcagcaaatacgctcagcagagaagtctcattcctgtgatgagtgtggaaaaagcttctgttacatctcagcgcttcatattcatcagagagtccacctgggagagaaactctttaagtgtgacgtgtgtggtaaggaattcagtcagagtttacatctgcaaactcatcagagagtccatactggagagaaacctttcaaatgtgaacaatgtgggagaggcttcagatgtagatcagcacttacagttcattgcaaattacacatgggagagaaacattataattgtgaggcatgtgggagggccttcattcatgatttccagcttcagaaacatcagagaattcacacaggggagaagccattcaaatgtgagatatgtagtgtgagcttccgtcttaggtcaagtcttaataggcattgtgtggtccacacaggaaagaaaccaaacagcactggggaatatggaaaaggcttcattcgtaggctggatttgtgtaagcatcagacgatccacacaggagagaaaccatataattgtaaagaatgtgggaagagcttcagacggtcctcctatcttttgatccatcagcgagtccacactggagaaaagccatacaaatgtgacaagtgtgggaagagctacattactaagtcaggtcttgacttgcaccatagagcccacacaggagagagaccttataactgtgatgactgtgggaagagctttagacaggcctcaagtattttgaatcataagagactccattgccgaaaaaaaccattcaaatgtgaggattgtggaaagaagcttgtataccggtcataccgtaaagaccaacaaaaaaaccacagtggagaaaatccatccaaatgtgaagactgtgggaagcgctacaagaggcgcttgaatcttgatataattttatcattatttttaaatgacacgtaagtgttgtacatatttatggggtacagtgtgatatttaaatatatgtatatgatgtataatgatcaaatcagtgtaattagcacatttatcacctcaattatctcttttttgtgttgagaaaattaaaaattcattgttccagcagtttgaaaataaattgttgtcgatgatagtcacctttagtgctgcagaacagcagaacttcttcctcttatctacctgtacttttgcatccattagccaacctttggccatcccacctatcccttacccttccctgcctctagagccactgttctcactacttctaagaaatcagctttttaagcttccccatgtgattgaggacagtttgaagttagtgtttcagccatagctcagcataccccagtggtcgtgggactgtcagagcagagaatgctgcagggtttctaacagaagtttgacaattagttattattcaggagacaggtcttagtataagagtttgttcacacactttcaaaacactaatgatgaacatgtcaaaattgatgaccactagaatgtcagccacatgtgtctttgtatttttgctgcatccttacattgcttgagtctggaagattgaggctgcactgacctatggtagtgctactgcactccagccagggcaacagagtgagaccctgtctccaaaaaaaaaaattaaataaatacctttctttgtttctagacaagcatctctctgtgtttctggaattttttttttgagtgtacatacatagtgtgttacaattatattcttattttcttcagcagtgaatatttgctggtatttttctattttataattgtatgcattatttttagatttctcagtgaacatcagaaaccccatctctacaagaaatacaataattagccagttgtgttggtgtatgtctgtagtcccagctggagactactggagaggctgaagtgggaggatcgcttcaacccaggaggcagatatatatacaaatggaatagaagtgagagtccataaagaaacccatacatctaaggccacttgattttcaagaaggatccaagattactttatggagacagaatagtctcttcgaccaatactgctgggacacctatacacagacacacaacataatgaagttagattgtacctcaccctacacttaaaagttaactcaaaattcatcagtgacctaatgtaacagctaaactataaaagtattagaagaaaacatagaagtaaatcttcctgactttatttggaatggattcttcaatgaaacaacataagcaaaagcaaatataaatacctaaatgggacctaggttttaaaaaatgctgtgcatacatggacattgtcatgaacatgaaaagaccatacagcatgagttctactatccagattatataaagaattcttacaactcaataacagaaaccactcaattaaaaaaatgggcaaagggctgggtgcagtgtcatgcctgtaattccagcactttgggaggctgaggtgggcagtttacttgaggccaggagttcaagaccagcctggccaacatggtgaaagtctgtctttactaaaaatacaactagctggatgtggtggcctcctgggctcaaaccatccttccacctcagcctcttgagcagctgagactacaggcgtgcaccacagcctctggttaagttttgtatttttttatagagatgaggttcctccatgttgcccaggctggtctcgaactactgcactcaagtaatctgcccacctcagcctcccaaagtgctgggattacaggcatgagccactgcactcagcctaaaaaaaaaaaatcctaatttttatgggtacacatatggagtatatatgttgatacaggcatacaatgcataataatcatatcagggtaaatggggtatctgttaccacaagcatttatcagatttttgtgtgtgttagaaacaatccgtactcgtttagttatttcaaatgtacaataaattattattgactgtaactctgttgtgctatcaaataccagatcttattcattctatctaagcatagttttgtacccactaaccatccccacttccctcaccaccaaccttaactttccctccctctggtaaccaacattctgctctctgtctccatgcattcaattgttttaatttttagctcctacaaataagtgagaagatgtgaagtttgtctttctgtgcctgacttatttcactgaatgtaatgtccttccaattccatccatattgttgcaaataacaaaatctcattctttttgtggctgaatagtactccattgtgtatatgtccatttcctgtatccattcacctgttgatgcatacttaggttgcttccaaattttggttattgtgaatagtgctgcaataaacattgcaggggagggtgcagatatcactttgatatagttttaattttttgaggaacctccatactgttctccgcagtggttctactaatttacattcccaccaacaatgtgcgaggattccctccttcactccttccacatcctcaccaacatttgatattgcctgtcttttgaataaaagctattttaactggagtgggatatctcatggtagttttgatttgtatttatctgatgatctatgatgtagagcaccttttcatatacctgtttgccatttgtatgccctcttttgagaaatgtctattcagatattttgctcattttaaaattgatttattaaattttttcctatttggtttgagcttcttatattctggttattaatcccttgtcagatggatagtttgcaaatattttctcctattgtgtgggttgtctcttcactttgttgattgcttcctttgctgtgcagaagcttcttaacttgacgtgatcccatttgtccatttttgctttggttgtctatgcttttggggtattactcaagaaatctttgcccagaccaatgtcctggaacatttccccaatgttttcttgtagtagtttcatagttcgaggttttagatttaagtctttaatccatttcgattttatttttgtatatggtgaacaacagggttgaagtttcattcttctatatgtggatatcatgtttttctagcaccatttattgaagagactgtccttttcccaatatatatacttagcacctttgttgaaaatgagctcactgtaggtgtagaaatttatttctggattttctagtttacgcagcactaaaaagaatgtactgtacatgaagtgatttctaggatatgttgttacatgaccatagaagagttagaaacgtgctttcttttaagtaataatggaaaataagaaatctacacatactgatacggtttggctgtgtctccacccaaatctcatcttgaattatagctcccataattcccacatatcatgaaagggacctagtaggaggtaattgaatcatgggagtgggtctttcccatgctgttctcgtgatagcaaggacagatagaggagtgactttgaatagaatgggaggcaggtttgccctaagcgatttccagcttgagatttccttagtgattttgggggcccaagatattttcctttcacaatactaagcagtttaatttctcttaaatgtggcatttccacgtctaaagaatattaatatgaaaactttaaaagtgggaagatagcttttccaggagggcaattggccctccatattggcccttgacagggcaggagcatcgccatcttggacaaacactgccattttaaagttcgcgttgatcaaaaactgcctaaatccaaagggcatcagcctaatggctaaggtcagcatgaccataaaccacaaatgacatctccaatcagaaacattccaaccataagataaacccctccctgaccagagacatgccagcaccgagataacctcccttccattggagagatgtcagtcccaagataacttcccctccaaccagagatattccaaccccacaacagacttctccccaatacagaaacattctaagcctgtggtaagctctctctccctaaagccaatacatactcttagtccgtaagagagagcgctcctgactgcaatcggccagaaggccctctcggtttattctccaaaacgaacctgtctttgactgttgagccgcttttcgtgttttttttttttttctctttaactcttacagccctcttaaacacttaaactgtggttgtttttcttgccaaaccagtggtacaacagtgtctggttgtaccaggggctggtgccccactcaatgcctctcccaaaccatttttcctggcccattatttaagctcttagatttagcctcatactattagcgtctagtatattagcctttcagccatctcctgaccgctccacagtcactccccgctaactccttgaagattgtatctccttgctttgttctctttcagtaacactcctgtcatcatgggaggcgtgtagacttcaggaattcctgtctattcaatattttctctcgaggacgcagggagagggaaggaccactctcagggccacagtccatattccaaaccaggcgcttgggtctatgggattcattcctcgtgggcattgcaggaagtgtagtcaaagagcaccgcggagtcccacgcttcccgccggaaggtgatactatagaacgtctcctttgagattcaaggaagtgtagcgcaggagatctgttgaatgacgagcaagtaggctcaggacggcgtatccggggaattctgggaaatgtagttcacacgctgcgcggggtaggggcacttccgctcccggggggcgaggttgctgcagtgcattcggtggtagtttggtgtcagtcctgtgtcttgtcggtccttctaaacgtgtccccttacgatgctggctcgcaaccacctggaagttgactaaggggagaaggagtctcgttggaaaacggaggtttggagggacaacggcctctcttttcgttcttgtcagcggagccttcttggtcttggggctgtcctcgcgtccccgggcatgaggctgggggttgggacttggtcgggacgcgtctcgcctggtttgagggtttttggggctctcagctcgctcagtccgcctccctccatcccacctgtgaggctactttctcacaatttagggttgggatgttattaatctccctgtacctcccactgctgttctttaaaatggggactttaggaccatcctaatgaaatcgttttgggaactggaagaggtaacacaaatgaaagccttaaagcagcccctcccttagtgactggtggtctcttcttagtgtttatttcccacgaagcctgtcaggtccccgggtggggtcagagctccatctgcagggatccccgcccttgtctctgattcctgcaggacgctgggtgatcccggacgcttctgacctctttttaggaaggcgagggttgtttccatttccacgaagggagaggaacatttaacttttatgccggacggcaatgcggtcagggtgtttcacagctttctccttccccagcctgattctcaaaaagagctgcagggagggacttcttggctactgagggcaaagttccacgagagtggtccttggctttttttcttttacagagatgctcaccccgaccaagagtgtaggatgtgtcctcaggcatgggtgttgataataattaagcctcaattggtaactttatcccaagagctttatacaagtagtcacattttcgccacaccgtggctctgtggagaggtactacttttttcagttttaaagatgagtgagatacaaaggagcaggagttatctgagaatagtcacctaagcagtaagaggtggagctgcggttgaaacctgggcgttacaggtcagagccttagttgataatcttttggatacattctcattgaggcagaggaactagctggaatctagtggggaaagcaagctaggacttgattgaagggagccttgagagcaaggcttatgggcttggactgttctgggagtttatcaactatttcattcattagaactatttcatttattacaaatatttcacttgttatgcagcggtatgattgtggagcgttcagaaattggagaaatacgagtagtacaagtttataattacccatgaatccagcatgtaaagatagtaactgttaaacttcgagtgcattttttttttttttttgagacagagtctcactgtgttgcccaggctggagtgcagtggcacgatctcggctcactgctaactccgcctcccaggttcacgccattctcctgcctcagcctcctgtgtgagtagctgggaccacaggcgcccgccaccacgcccggctaatttttttgtagttttagtagagatgaggtt[148 bp omitted]aaacatttaaacaaaattttatgattaaaaaaatgtgttttcccttatgtgtttaactatggaaatttggaaacactgccaagagggaaatagctagtgaacttacatgttatatcatgctcatcctaatttatctcat[142 bp omitted]agaaactccatctctactaaaaatacaaaattagccagacatggtgacgcatgcctgtaatcccagctactcgggaggctgaggcaggagaatcgcttgaacccgggaggcggaggttgcagtgagccaagattgcaccattatactccagcctgggcaacaagagcgaaactgcatcctctgcctcccggtctcaaaaaaaaaaaatatttaacgttttattttcatatcatttgaaacctatagaaaaattgcaaaaatagtgttagaaattctcatatactctttacccaaatttgccaaatgtttacatttttcctgtttgctttgttcttgctgatcacccagataccaccaggaacatacctgtagccagagacagttgcttgtagctttctgcagcaaagaagcccacatttcaagataattgtggggtgtcttggtaagaggtgtttagaaagggctggttatagggtttcacataacatgctagatactattagatattatactggctaggcatggtggcttatgtctgtaattgtagcactttgggaggccgaggcaggtggatcacttgaggccaggagttcaagaccagcctggccaacatggagaaaccccatctctactaaaaatacaaaaattagctgatttgtccactgtgaagttacttttttaaaatttgagggggcgtgcgcctgtaatcccagctattagggaggctgacgcataagaatcatttgaacctgggaggcagaggctgcagtgagctgagatggcgcccctgcactctgatctggatgacagagtgagactctgtctcaaaaaaataattaaatattatattaaataatattgttatctattacatatcacatctgttaaaaagctaataatagtagttgtagtgtcatttattagatagtgttggataccatattacataacgttgttatctaatctgcagcttccatatttaaatttattcagtttcttcttttggtccttataactatcccttgccccactttttacctgtaaccccattcaaagtccaattttatgcattgtctttattgtcacatttctatacttttgtttaatctagaaggattccacagcctttgtcttttatatgcatggttttttgaagagtataggcaagttgttttgcagaaagacattcatttggggtttgtctggtaaatttcatgtttacgtttagagtatgcatgattggcagggataccatagtagtggtgagatgtccttttcattgcaacctaacagtgtccaaatgatgttggtttgtcccttcactggtgatctcaactttgttcacttggccaagatgaagtctttcagatttgtccactgtgaagttactttttttaaattttgaaaataataaagttccttatggggagatacatgattagtggacattctactgtaaagaagagtttccatttctcccccatttattcattccttcattcaactataaatattctattgatatggactcagaattcagtcttactgatttcaatgacatgtagattaacaattattttttccaattctatcaagatgtatttcacatatagctttcacccatttcaggcatggaactccgtgatttttaggaattttgtgaagtggaataaccatgatcatgattcagtttagatcatttttatctcccagttggactccttgtgcccatttatagttaaacctcattctcatctcaaatgtgaagcaaccactaatctactttctctatgatacatttgcctattctgaacatttcatataaatgcgatcacacagtccatgggtttttgtgactgccttctttcatttaacataatgtttccagggttcatgcatgttgtagcatgagtcaatatttcatttctttaaatttccaagtaagatttcattgtatggataggcgacaatttgtccatttacccataggaaggcattttggttgtgtgcaattttgggttattatgaataatgcccctgtgaacattcaagtgctaattcacaacacatgttcatactgttgggtggcatcactgaccaccccttcatgtctctttttttttttttgccttccatggcatgtttcaggcacaattctgtcttctcttgaactgcataactgagaactctgcaaattccccaaagaaggaggaaaaatgaccatgttcaaggtgagtaagtctggtctcttttgctgttcagattctgttttgctacttaagattgtcacatgtttttctcggtcttgggaagactcaaggagaacaacagttatttgtgcacctgttgtgtgccagatgcttccttgtttcttttgtgttgaatttgcgtttggatttgattttgtttacttttaccattatttatgttatgagtagaaatttagtgggaaggaacaattctcccatttcactacatcttttctcactaattaggcatttttattttctcatgctattcctcatgtatattcataactgtatttgtattgatacttatctaatttaaattgtgttctttgtgtttaatattatgtaatattcattatttatggttgcatcatgttcccattgaattgatgctcctttttttttttttttcctcgagacagagccttgctctgttgcccagactggagtgtggtggcgcaatctcggctcactgcaacctccgcctcccgggttcaagcgattctcctgccccagcctctcaagtagctgggattacaggcgctcaccaccacacttggctaatatatgtatttttagtagagacggggtttcaccatgttggccaggctggtcttgaactcccggcctcaagtggtctgcctgcctcagcctcccaaagtgctgggattacaggtgtgcaccactgcacctgccgatgtttctttttaactactttatactcacaggcactaggagctcagttttgaaagagtacttttgacatgtgccacgttggttgttttgtagataaaatatccatatgtggcatggcacagcaggctgtaactgtggcttcacacaaggatttctggagattttcacataggaagagctagcttttgttttccccatgcttaagtcatgcattgtgtgtatgttatttactggtcttttcttattcctttatgtattaaggagtttgaccaaaatgcagcatcctgggctgcacatatatcggtttcggtgaatcttgccagttgctccagcaacatttagcaattcagtctcaactttgtttgataatgcccagggttctcgtacttgaaccctggatgtaatcatttttctgtcttttttttttttttttttttttttagttttttagttttggtagctttagtttcaaatgtccatgatatcagaagattctctagtcactgtgttctattcctttgtttgttcctcagaacagctgaatgatgcagttctcagcctcatcttcctcttaaatatgtgaaatatgagaaacctgctgaggttcagagaggaaacctagggtcggcatgttagctattttgctaaattgaaagagagagagaagaagaaagaggattctccattgaaggacctatgccttctggtatgggtgtctggagtgccctcttgagtgatgacaaccactggtgacatagctcctccctgacccctcctcgggggtcctcttctcttcctgttgtgccacctcctcaggtgcacctagtactccaggcaccaaaggacagtgattgctacactcactatagaaaatctttaaattcctaatggcaaagatggcttatagagtgttaccagggaatataacagcctaaggtgaaaatatttaccactttgatatctaaaaaagacataatccaaaataagaatcttatgtacagaatggagaaaaaaattcaaaggaatatgaataaaggacattaatacattaattggtaaattttagagaagaaatagaagtggccaatacatatttgaaaaggtgatagtattatttatattcaaatacatgggattaataaggtgaattctctctaatgagattatcaaaatcacaggaaatttgataatctgcttttggctattttaagaaaaaccagggtaatatatccccttgaaagattttggagtttgagaaaaaattgagatctgacatatatgatcacaattttaaacattcttattttttgacactttaattttcatttgaaattattgtattatagtttattcttattctttagagacagagttttgctctgttgcctcggatagagtacagtgatgtaagtgtagcccactgcagccttgaacccctggggtccagatcttcctgccccagcctcccaagtagctaggactacgggcacgcaccacgatgcctggctagttttaaaaatttataaagttggtgtcttgctgtgttgcctggtctggtcttgaactcttgaattcaagcaatccccccaccttagcctcttaaagcactgggattacaggtgtgaatcactgcacctggtttgaaattattaaattaaactaaattattattttattttatttcttttttgaaatagagtcttgctgtgttgcccaggctggagtgcagtggcgcaatcttggctcactacaacctccgcctcctgggttcaaacgattcttctgtatcagcctcccaagtgtctgggattatagtcacgtgccaccatgctcggctaatttttgtatattttgtagagacggagttttgctatgttgccaaggctggtctcgaactccagaggtcaaatgatttgcttgtctcggcctccaaaagtgctgggattacaggcatgagccaccatacctggccaaaattattttcaatgatcagacgggagagtaaggtccacatacatgattttctttgcaggattggtattaatgaaaactacataaaattaaatattcattatttagaataaagatagatcatcagttccctgtaatagtatgcagacatgaaatgaaatagataactataatgaaagttataataaaaaatccaaagaaatacgaataaaggacattaccagccaggtgcggtggctcacgcccatattcccagcactttgcggggctgaggtgggcagatcacctgaggtcgggagtttgagaccagcctgaccaacatggagaaaccccatctccaccgggtgtggtggctcatgcctgtaatcccagcactttgggaggccaaggcaggcggatcacgaggtgaggagatcgagaccatcctggctaacatgatgcaaccctgtctctactaaaaatacaaaacattagccgggtgtggtggtgggcgcctgtagtcccagctactcgggaggctgaggcaggagaatggtgtgaacccaggaggcggagcttgcgttagctgagattgcaccactgcactccagcctggggacagagtgagactccatctcaaaaaaaacaaaacaaaacaaaacaaaaaacagcaaaaaaagagaaaccccatctctactaaaaatacaaaactagctgggcatggtggcgcatgcttgtaatcccagctattcaggaggctggggcaggagaattgcttgaactggggaggtggaggttgccgtgagctgagtttgcgccattgcactccagcctgggcaacaagagcgaaactccgtctcaaaaaaaagacaaaaaggtaataaaattaactaatgttaattaaatacctagtctgtgccacagactttccccatttatattctcttgcttattcctggagaaaactgatgtgacagtctttatacagaaaggaaacgaatgcatgtaggcaaacttatccaaggtcacgtggctgggaaggcaaaggcacagagccttgggattgagccttgtgagtgagcacacacactcagtgtgatcataggcacactggctccagatcatgacattcagtgctgcaattaatatatgtagtttgcgtcttgaatacagaggacccactccatggctgtcccacacaggtcactgtaaacttgttagtttggcagatattaaaaaaaaaatgggccgggtgtggtggctcatgcctgtaatcccagcgctttgggaggccgaggccggcaaatcgcctgaggtcgggagttcgtgaccagcctggccaacatggtctctactaaaaatacaaaattagctgggcatggtggcaggtgcctataatcccagctattcaggaggctgaggcaggagaattgcttgaatccaggaggcaggggttgcagtgagctgaaatcgcaccactgcactccagcctgggcgacagagtgagactctgtctcaaaaaataaaaagaaagaaagaaaaatgattacatccagggttcaagtacgagaaccctgggcattgtcaaacaaagttaagactgaattgctaaatgttgctggagcaactggcaagattcattgaaacctatatatgtgcagcccaggatgctgcatttagagtcctagagggttacttacaaggagacttaataagtgcacaaagtaaacctatgggactttttcatcattgcacttctggtggagctctggaaaatcagtgtcattgcgaggatacagacagaatgaatgggaaatctgtatgttgacctacatctttcaagatccacagcaacttctcacccatccccttcacctgctcattgccacccttctcccaggaatcactggtcatgagattgagattgcatacgtttgttgttgtaggaggcagtgaccttcaaggatgtggctgtggtcttcaccgaggaggagctggggctgctggacgtttcccagaggaagctgtatcgagatgtcatgctggagaacttcagaaacctgctatcagtgggtgagcacaggcaccctctgtaatggaacatcaggccccaggaatggctttgtatcctagggtgtttgtgttagtttgttcttatgctgctatgaagaaatacccaagactgggtaatttataaagaaaagacatttcattgactcacagttctgcatggctggtaaagcctcaggaaacttacagtcatggtggaaagccgatgggaagaaaggcacctttttcatattgcagcaggaagaagtgccgagcaaaggggaaaaggccccttataaaaccatcagatagggccgggcgcggtggctcatgcctgtaatcccagcactttgggaggcc[136 bp omitted]aggcggg[135 bp omitted]ataaaaccatcagatctcgtgagaactcatccactatcacgagaacagcatggaggaaactgcccccatgatttaattacctcccaccagctccctcttatgacatgtggggattatgggaactacaattcaagatgagatttggggacaccgccaaaccatatcagtgttcaagttcgagtgtgcagtgagaacctaaatttctagtaaattttacctaagatgtattgggattaagcatgtgactttgttcacagggcatcaactttcccaccgagatacttttcacttccaaagagaagaaaagttttggatcatggagacagcaacccaaagagaagggaattcaggtaagaaccaagcaacgatgcatccttgtacgtgacccttccatctgttttacttctgtccattgcccaactccattgccctggtataaatggccaaacctgtttcctggattcttacctccttcctgctggttgtcctgctcccccaccccctcttcccaccctgacatctgttttcctcatagcagccaaagtgatccttagggaatgtaagtcagattgccattcctcagcttaaaagcctttatggcttcttatttgtgttaatgttacaactgctttaagtgccttttagagacccttgatctgctcttcatcccctactgcctctctgactacatctccattttccagccacgttgtactccctgctgtttctccatcctgccaaggacactgtattgcctgttgctgtcacccagtgaccacacacttagcagattaaacaacaaacaattatctttctgttcttcagatctgaagtctgacacatctcactggacaaaaatcagggtgtccctagggctttgttcctgtctagatgttcttggggagaagccttcactttaatttaccaatccctaggcactgtccacactccttggctcttgtctcccttcctccatcttcaaaagcagctacattgcatctctaaccattcttccatagtcatctgccacccttcttaagcctctgttttccacattttgggtcccttgcgattggattggtcactcctgcataatctagaatgaccttcttactctctctttagctgactagtgaccttaattgcatctgcagccttaatatctcttgctatataacataacaggttcataggtcctgggaattggatgtggacatctttcaaggaccattgttctgtctactacagaagcttctgtcttagagtttatatatgctcttctttctgattggaatactctttcacctcaagaccttctgacccttcctttattctggtctctgttcagttttaatatcatgagaaaggccttctctgaccactctatttaaaataccagccgggcgtggtggctcatgcctgtaatcccagcactttgggaggctgaggcaggcagatagcatgaggccaggagtttgagaccagcctggccagcatggcaaaacctgactctactaaaaatataaaaattagctgggtgtggtagcacagtcctgtaatcccagctactcgggtggctgaggcgtgagaatcacttgaacccaggagccagaggttgtagtgagctgggattgtgccactacactctagcctgggtgacagaatgagactctgtctcaaaaaataaataaagaaatatatatatatatatatatatatagagagagagagagagagagagagagagggaatggaataccatcctatctttacccttctggtgttgtcttatactgtgtcttatatatttctatttagctgtcatctctacccactggaatggaatgtcttaagaggaggacttttagctgttcaatttttattttaagattcagggggtacatgtgcaggtttgttacctgggtatattgtgtgatgctgaggtttgcattgcaaatgatcctgtcacccaggtactgagcatagtacccaatagtggtggcaggataaccctcaggttttaaggctatgtgtaccggtgttagaggtagtggtgatgggctgggtgggccagtcctgaggcccccacatggtgtgtgcaggtgagtgtcagcggtgatggtggcagcaggcttgtaggacctgtcctcaggtcactaggaggagtatacagatgccagtggtggtgatcagggcagggaaatccttaggtctccagacagcatgcttgggcacctgcggcagggttctgggtctgttgtaaagctccctgcatggtacatgctcatgcctggggcaaccaacatggcagggtgatctcaacagccccaggtggtatgcttaggtagtggaggaatgacgccaggccaggtgagcctgtcctcaggcctttcagtggtgcaggcagatgtaggctgtggtggaagaggcggcgtgatccctaggtccccagatggcatgctccagcactggcagcacacaagctgggtctttgtcaggtctcctgtttgtgcacacatgtgcctgaggcaacacagggtagagcaatccccaggtccctctgtgtcatgctctggcactgagatgggcggtaccaagtgaagtgggcttgtcctgtgcacgggcacaggttgtggtgggcagtgcaagggactccccatgcctttaggaggtgtgcttgggtggcagtggcagagtgtgcagagaaactttcctcagaatgagaacacatatgagtgtacagtggccctgctgctgggggtgaggtagcattgccgttagaggcagcagccccagacaggcagctttcaagctctggtgagtgcacacactttgggtccctttgtactgtactgggggcagcctccctggtgtccttcacggcccattccctagagtatgggacactatgtggcctagattgctggggactctgccatactgctgggtctaacaggcattattgtaaccctctgggtggatgtgggggcatgtccatggggcttcagggatttggagatgcaaaggctgttgggccccagggcaagatgcagtctggtgggggtgcagctctcaaaatagcgctgtgccatagctgcttgagtctcaggaagtgtgtgggtcccatcatgagtaccctctctgagtgccattgcatggactccaggtagccccctgtgctagtctcagggcccacaggggtcgagggcctctctcatggctgattgctggagtgcacagcggaaatgtaaaccactagggctctctcacttaccctttcccagcactaggagcctttcccggctttcaggtgatcacggccagaagggctacctcccttcgctctccttttgtgcttcgggtgtttcctgtcacttctctgctgaattccagtgatccctcttagatgctatttgatgtatgagtatctatttgctttttaaattttttagtaataaaatatatagaacacttcatgaatttgcatatcggccttgtgcaggggctgatcattccagttttaccatatgtgctgctgaagtgagcactactcattattttggctctttgtggaggacgcaagctctgggtgtctttagtcagccatcttgaagtcctcctacccttaacgttccttctgattcatcacatatataatttagtagttacataatataccatgcaagattttagactaactaggaaattggtagaaatagtaacacattaactgtattatattaatattttaaattaagtctttcatttctaccacgtatgagacattatgtcattcaaaattggtttcgtgacaacgagagaccgtggtgcacttggaaaacacaaactgtaccttccttgtattcagtaaagtttcaggccatgtcctaagtgaaatcctgaaaacactgaacaaaggtttcacttacccacatctcttaattctgtgtccttataggaggcaagatccaaactgagttggagtctgttccagaaacaggaccacatgaagagtggtcttgccagcaaatctgggaacaaactgcaagtgagttaactagacctcaagactccataagtagctctcagttctccacacaaggtgatgtcccctcccaggttgacgcaggactatctataattcacataggagagacaccttctgagcatgggaagtgtaaaaaattcttcagtgatgtctccatccttgatcttcatcaacaattacactcaggaaagatatcccatacatgtaatgagtacaggaagagattctgttatagctcagctctttgtcttcatcagaaagttcacatgggagagaaacgctataagtgtgatgtgtgtagtaaggcatttagtcagaactcacaactgcaaactcatcagagaatccacactggagagaaaccattcaaatgtgagcagtgtgggaaaagtttcagccgtagatcaggaatgtatgttcattgcaaattacacacaggagaaaaacctcatatttgtgaggaatgtgggaaggccttcattcacaattcccagcttcgggaacatcaaagaatccatactggggagaagccattcaaatgttatatatgtggtaagagcttccatagtagatcaaatcttaataggcattccatggtccacatgcaagagaaatcatttagatgtgatacctgtagtaatagctttggtcagagatcagcacttaatagtcattgcatggaccacacaaaagagaaactatacaaatgtgaagaatgtggaaggagcttcacttgtaggcaagatctttgtaagcatcagatggaccatacaggagacaaaccatataattgtaatgtatgtgggaagggcttcaggtggtcctcatgtctttcaagacatcagcgggtccacaatggagaaacaacattcaagtgcgacggatgtgggaagagattttatatgaattcacagggccattcacatcagagagcctatagagaagaagaactgtataaatgtcagaagtgtgggaagggctacattagtaagtttaatcttgacttgcaccagagggtccacacgggagagagaccttataattgtaaggaatgtggaaagagcttcaggtgggcctcaggtattttgagacataagagactccatactggagaaaaaccattcaaatgtgaagagtgtgggaagaggtttactgagaattcaaaacttcgtttccatcaaagaattcacactggagaaaagccttacaaatgtgaggagtgtggaaagggattcagatgggcctcaactcatctaacccatcaaagactccacagcagagaaaaactattccaatgtgaggattgtgggaagagcagtgagcacagttcatgccttcaagaccaacaaagcgaccacagtggagaaaaaacatccaaatgtgaggactgtgggaagcgctacgagaggcgcttgaatctagatatgattttatcattatttttaaatgatatataattattgtccatatttatgggttacagcatatttcaatacatgtatacaatgtataatgatcaaatcagtgttattagcatatccatcacctcctttatcatttatttgtggatcatttatcatttctttgtgctttgaacgttcaaaaactgctgttctagttatttgaaaataagttattattaattatagtcacctttagtgctgtggaacactagaacttgttcctttcatcatcttactgtactttcatatctgttaacgaatctttcatcatccaccctctctcctacttttcccttctagtaattgctatgccatgctgcttctgcttttttttttttttttttttttttttgagaacagagtcttccaggcttgagtgtagtggcatgatcctttctcactgcagcctccacctcctgggttcaagcgattctcctgcctaaacctcctgagtagcagggattacaggcacgcaccaccacgcccagctaatttttgtacttttttttttttttttttgagacagagtatcgctctgtcgcccagtatggagtgcaatggcttgatctcggctcactgcaacctctgcctcctgggttcaaacgattcttccctgccttggcctcccgagtagctgggactacaggcgcccgccaccacacctgactaattgttgtatgcgtagtagagatggggttttg[142 bp omitted]accacattggccaggctagccttgaactcccaaactcaaatggtccacctgccttggcctcccaaagtgctgggattacaggcatgagccaccgtgcccagccaatgctatgctgcttctatgatgtcaactttttagcttccacatatgtgtgaaaacatgtggtatttatctttctgggcctgaatttacatcactcaacatcatgttctccaaagcttatctttatcttgccataaatgacagaattttattattttttatggttaaatagtgtacctttgtgtatgtatgccacattttctttaccattttctgttgatgaacacttagattggttccatatgttagctattgcaaatagtactataataaatataggagtgcagataggagttcaacacactgatttcctttcctttggatatacagctagtagtgggattgctggatcacttgaatgctgatatgcataagaggatctacactggagaaaaaccatggaagtgtggagattgtggtacatgcttcagtcagggctcacatcttcaaattcagtgtctgttctgtagagaaaccttaataatgtgatatatgtgacagcaaagagttataagatatgaatatgttaattttagtagatacttccgaaaagtatttcaaactggttgtaccactataaactctgaccattattaggcaagaattggctttttttttttttttcttttgagacagtcttgctctgtcacccagactggcatgcagtggaatgatcacggctccctgcagccttgacctcccaggctcaagaaatccttctgcctcagcccctcaaaagctgggactataggcatgcaacaacacgcctggctaaatttttgttgtagagatggggtctcactatgttgcccaaattggtctcaaactcctgggctcaagcgattctccctcctcagccttccaaagtgctgggattacaggcctgagccatgcgcacagcattttgttttgttttgttttgtttttgagatggggtctctcggtgttgcccaggctggattgcttattcacagatgcagttacagtgccctatagcctcgaactcctgggcctaagtgatcctcttgcttcaatcccctgagaagctgggactacaggcatggaccaccacccctgattgatcttctttagtttctataacaaaatagtacactgtttccacaaacttgggaaggctagtatttgggggtggggggcgtggaaatcactaaacaacaaagaaaatctgatgaattggacagcataaaaatattggcataaagatgaacataacataagcaggaatatttaaagcacatactttttatagagtgtctcccctgtaatgtctctggttaaatgaaagggtttcaaatgtgaagacaaccctaaccatactcattatctgtaaaagatgtagcattgtcatggactccttaataaacgtgaagactttaatccatctgaaggtgcatcacatttctgaagtttccaacactgacaaggtgatgggcttatggatgaaaactcatgaatgggaaaaactcagctatcgttaaagcccatatattttattaaagatattggggctgtctcctaaatctagttagtgatgaatttcaagtctagagccatcaccgaatccttgtccacattcattacacataggttttctgagaaaattgtctgctggttatgagaggtcttctcccgtgccaaagtgagtataataaccttgcttttggccaggtgcggtggctcacacctgtaatcccagcgctttgggaggccgaggtgggcagagtgcctgaggtcaggagtttgagactagtctggccaacatggtgaaaacccatcactattaaaaatacaaaacaattagctgggtgtggtggtggcgtgtgcctgtaatcccagctactcaggaggctgaggcaagggaattgcttgaaccagggaggtggaggttgcggtgagccgagatcacgccactgcactccagcctgagtgacagagtgagactccatctcaaaaaaataaaaataaaaataaaagtaaacaagcttgctttcttttatgtgctccttgattttgatggtgatgtgaaatcaaactgaagctgaaaatacaataatcacatttatacagggcatttttcaaggaaatttattgatttttactttaataatttagtgcctcacttttgtaagtctcttgtaagtggccaggcatggtggctcacacctgtaattccagcactttgggaggctgaggcagaaggatcaattgaatctaagagtttgagaccagctttttacagagtgtctcccctataatgtctctggttaaatgaaagattttcaactgtgaagacaaccctaaccatactcatattctagttcctttgcctttccatataaattttagaataattttatatctacaaaatatcttgctggaattttgatagtaattattttaaccctgtgtatcaatttggggagaatgaacatttttgctatattgagtcccacgatcctcaaacatggaatgtgtctccattcatttaatattgttggattttcttcatcagtgtgttgtaattttcatcttacaacccttgtacatcttttgtcaaacttccatctaggtatgaactttgatttccgtgtgttcattgctagtataatatatataaattaattttggtatcctgatcatgtatcctatgatcatgctgaattcgcttattgtctaggcattcatggattggaagacttcacatttttgtgatgacagtactacccaaaccaatctacagttttactgcaatcactatcaaaatccaaacagccttttttttttttgcagaaatcaattcataaattcatatgtaattgtaatggaggcaaatagacaaaatctttcttttttaaaggaacatgatggatggctcccacttcatttcgaaacttactaccaagctatagtaatggaatagaatttagagtccataaagaaactcatacatctaaagtcacttgattttcaagaaggatccaagattgcttaatggagaaagcatagtctcttcagcaaataatgctgggcaaatatatatacatatgcaacataatgaagttagatccgcacttcacactatacttaaaaattaactcaaaatgatcaatgacctaaatataagaggttaagctatacaactcttagaataaaacataaaggttaatcttcaagactttttatttggaatggattcttagataagacaccatatgcacaagctaaaaaaaccccacataaattggactagagcaaaaaaaaaaatgctatgcatacagagacattgtcaagagcatgaattcttctagtatcagaatatataaagaactcttagaccaggtgaggtggctctcacctataatcccagcactttggaaggctgagatgggtggatcacttgagcccaggagtttgaggcctgcctgggcaacatggcgaaaaccatgtctctacaagaaacaaacaaacaaacaaaaaacaacaacaaaaaacaaaggtagccaggcatagtgacccatgcctgtggtcccagctactcaggaggctgaggcagaaggattgtttgagcctgggaggtcaaggctgcagtggggcgtgatgtaccattgcactccagcctgggcaacaaagagagactctgtttcttaaaaagaaaagaaagaaagaactcttacaactcaataacaagaggagaaaccacccaattttctaatgggcaaagatacaaatagaaatttcagatatacaagttaccaacaattatgtgaaaagatgctcaactattagtcattaggaaaatgcaaatcaaaccaataatgagatgccattttacaacagctatgttagctatcatctttaaaaatagaaaatagccgatgtggtggcaggcacctgcagtcccagctacttgggaggctgaagtaggaggatcgcttgagcccaggagttttgaggtgtagtgagctatgcccactgggtgtccacactaagtcgacatcaacatggtgatctcccaggagcagaggactaccaggttgcctcaggagaggtaaactggcccagggtggaaacacagcaggtcagaactcccatgctgatcagtagtgagatgttgtctgtgaatagccactgcaattctgcctgcacaacgcagggagaccccgttttcaatttatacacacacacatatacatatacatatatattttatacatacatatatacaaaataagtattggagaggatgtggagaaattactaccctcacacactgaaggtgggaatgtaaaaatggtgcagttgctgtggaaaattgtttcgtggttcccaacatagaattaccatatgaatcactaaatttcatatctaggtatataccccaaagaattgaaagtaggtgatgaaacaaatacttgtacaccactgtttgtagcaacactattgactacagccaaaaggtggaaagaacccaaatgtccctcaatcaatgaatggataaacaaattgtggcgcaagcctgtaatcccagcactttgggaggctgaggtgggcggatcacctgaggtaaggagttcgagaccagcctgactaacctggtgaaaccctgtctctactaaatacaaaaaaattagctgggtgtggtggcgcatggctgtaatgccagctacttgggaggctgaggcagaagaatcgttttaacccaggaggcgggggttgcagtgagctgagatcgtgccattgcactccagcctgggcatcaagagggaaaccccacctcaaaacaaaacaagacaaagcaaacaaaaaaaacaaatcgtagtagaaacataaaatattatgaagtact[148 bp omitted]cccgtctctactaaaaatacagaaaaattagccaggcgtggtggcacgcgcctgtagtcccagctactcgggaggctgagacaggagaatcgcttgaacccgggaggcggaggttgcagtgagctaagatcgtgccactgcactccagcctggcactttttttgagattccgtctcaaaaaaaaaaaaaagaagcaggatgctaagtgaaaggtgtcagaaacaaaaggttccataatgtataattccatttatatgaaatgtccacaataggtaattcaataggacagagattagtgttagacagtgactgcttagtgggtatggggtttttggggtgatgaaaatgtttcctaactttttatttgtactacatatatcctaaaatggtgaatttcacgttttgtgcattacacctcaatagagatgttttaaataataaaatacattaaaatgttttgcatagataaaacaataaaaaaaaacgtttttgttgagaaaatatttgcgagataaaatgttaatatcatgaatataagaacagtgcttgaaaagtgagggataaaaccaaaaactcaataagaaagtgggcaaaacatctggacaatttacaaaaaatgtaataatgacacctgaaaatatgcaagaatatgccatctttacaagagttataaattaaaactacatgccatttcttaccactggcaaaacttatttgaagagtgtatcatctcgcttgttccctttccagtaacactcctgtcctcactagaggggtttagacttcaggaattcctttctatacggtattttctcttaggcacccagggagagggaaggacgactctcagggtagaagtccacatttcccaacaggcgctcgggggtacgagattcgttccccgtgggaagagtggtcaagggcttcccagtagtcgtcaacacttccctttgagtgtaatgctgcaggagtacagtccagaccctcagtggaatcgcggtcggtttagctccggcagttgggtcccagggaattctgggaagtgtagtccagacgctcagtggagtcgcggtcagtttggctccggctggcgggtcccggggaattctgggaagtggagtccaaacattcggtggagtcgcggacacttccgctcggggactgaggttgctgcagtttttccgcgatagtttggggcagttccgcgcgttgcaggcccttctgaatttcctggacctacgcattggatcctcaaagaactggtgatcgaattaggggaaaaggggcctcgtcggagagtagaggtttggaggggcaagggccgctgtttgcgttctcgtccgtggcaccttcttgggcttgggtctgtcctcgcttcccgggggcattggtacttggttgggtcgcgtctcacctggtttcagggtttccggggctctgagctcgcccactccgccccctgcaccccacgcgcgtggccacttcttctcgatataacgttggggtgttaatctccttgggtttcccgttactgttctttaaaatggggactttagggccatcctaatggaatcgttttgggaactggaagaggtaacacaaatgagagccttaaagcagtccctgtcacttggtgactggtggtctcttgttaatttcccacgaaggaccgggtggggtcagagctccagctgcaggggcctcggcccttctccctgatccctgcaggacgctggatgatcccggaagccttctgacctctttttaggagagcgagggttgcgtccactttcatgaagggaaaggagcatttaacttttatgggggacggcgacgcggtcaaggtgtttcacagctttctcgttccccaacccgacctttccagaagagctgcagggagggacttcttggcttctgagggcaaagctctacgtgagtggtccttggctctttgaccgagatgctcaccccaaccgagagtgtataggttgtgtcctcgggcatgggggtcgataataattaagtcttaattagtaacttcattctaagggctttatacaaataaatttacgccacaccgtggctctgtggagaagtattgcttttttctattttaaaaacgaaagtgagacacagagcgcataggcacccgactagtgagaggtggagctggggttggaacctaagcagtctgggtcagagcctgatttgatcttctcttgggatacgttgtcactgaggcagaggaactagttggacttaggtggggaaagcaagacttaggggcttgaaattttctgagtttctaaaaatgttgtcaactattttgtttcaatcattacaaatattttgtattcttatagaaccatgtcattgtacagcattctatttttctttattaagaacaaaatgggcctggcgcggtggcttacgcctgtaatcccagcactttgggaggtccaggcgggcggatcacgaggtcaggagttcgagaccagcctggccaacatggtgaaaccgcatctctactaaaaaataattacaaaaattagctgggcgtggtggtgggcgcctgtaatcccatctactcgggagggtgaggcaggagaatcgtttgaatctgggaggcggaggttgcagtgagcggagatctgccattgcactccagtctgggcgacagtgcgagactccgtctcaaaaaaaaaaaaaaaagaacaaaatgtttttattacctacgaatccatgaagtaaaggtagcaactgttaagctcgtaatgtgtttctttctttttgtatatttataggtttatttatgaacatttacaaatttttataatttttttcttaatatttcccccttatgtgtttaactatggaaatttccaaatgctgacagactaaactagtgaattatcatgttatatcatactcattaatctcattattgttattatttttcctatgactgtttcctaaaattataaaactttttattttcatgtcatttgaaacctatagaaaagttgcaaaagtagcctaagaaattcttatttactctttacccacgtttgccaagtgtttacatttttcctgtttgttttgttgatgaccatcagctgaataccactagaaacatacctgtaaccagagacagctgattatagctttctgcagcaaggaagcccacgtaccaggggctgtcttggtaagtagaatttaggaagacctagtatatggtttcacataacatattagataatttcagattgtataccagataatgttatttattaaatattagatatctatccaaagactgctaatagtagtttattgtattatctattatacagtgctagataacatattacctaacttcatgttatgtactctgcagttctatatttaaatttgttctatttttcacttaaggttcttacaagtgtcccctacccatctgccaccaccacctgtgttcacagtctaattttatgcattgcctttaattgtcacatttccataatctttaatcttgaggattctacaccctttgtctttctatgcttgatatttttgaagagtataggcaagttattttggagaaaggcattcatttggagttgtgtctgatgtaattcatgtgcgggttcacattatgcattgttggtagggataccacagaagtggtgaattgcgggttcagattatgcattgttggtagggataccacagaagtgctgaaatgtccttttcattgcaacataacagggtccaagtgatgtcagtttgtctcttcattggtgatctcaaccttgtccacttggccgagacgctgtctttcagatttctccactataaagttacttaaaaaaaattgaaaagaataaagtttcttaggaatagataacattattagtgggcattcagctgtaaaatgaccttctccatttattctttgttcaactacaaatattctatcaatatggccttagaattgactcttaagttagataacgtgtacattaacaattattttttccaacctattgtatcatataacttacttatatcaggtgtacatccagtgatcattagacagtttgctgaatggagtaaccatcaccacaattcggtgatcatttcatgctcatattgatttcctcctgcctacttatggttagacttcattctcactcagatctgaagcaatcactaatcagttttctctatgcattttcctacccagacattttatagaaatggaatcctgcaatatgtggtcttttttaactggcttctttcatttagcaataatgtttcaaaggttcatgtatgttgtagcatgagtcagtacttcatttctttaaatttccaagtaagattccattgtatggatagaccatgatttgtctattcatttacccacaggagggcattttggttgtgccgttttgggtttttatgattaatgctgctgtgaacagtcatgtgccaattcacaatacacatccctgttggtgggtggcatccctggccaccttttcatgtctctttttctgcctttcctggcactttgcaggcacaattctgctttcccaggaactgcatcactcaggactctgcaagtttccagaagtaagagggaaaatgaccacgttcaaggtgggtaggacttgcttctattactcttaaaattccctctcagtacttaaattgtcacaagttttcctctgtcttgggaagactcaaggagaaaaacagacatttgaggatctcttgtgtaccatgtacttcctttgttacttttgagtggattttgcatttgtttttactacttgttttcttctatcatttattctatggagtagacaagattgtaggaatggataattatttcattatactacttctctgctcacacattagctatttttatcctgtgatactcttcctcatgtgcattcataactgtatttgtattggtgatgttaatctaatttaaattgcactctttgtatttaatattatataatgttcatttttaatggttgcaccatattcccatttaatcgatgttcctttttaattactttatacttccagacaccaggaactcagttttgaaaggctacttttgatgtgtgccacgttggctgttttgtagatagagtatccatatgtggcacatcatggcaggctgtaactgtggcttcacacaaggattgctggaagtttccacacaggaagagctagattctctttcccccatgcctgagtcatgccttctatgtcttttacttactggcctttctttactcctttatatactaaggaatttgaccaaagtaatatgtaagctaatttttttttttttgagatggagtttcactcttgttgcccaggctggagtgcaatggtgcgatctcggctcactgcagcctctgcctcccaggttcgagggattctcctgtctcagcctcctgagtggctggggttacaggcatgcgtcaccatgcctaattttgtatttttagtagagacagggtttctccatgttggtcaggctggtctcgaactcccgacctcaggtgatccacctgcctcggccttccaaagtgctggaattacaggcgtgagccaccgcgcccagcctaacctaaattttttgtgcatgatactagaaaatttgccagtcacttgtgttttgtttcttcatttactcctcagaacagctgaatgaggctgttcttatcttcctcttaaacacatgaaatatgagaaacctgctcaggttcagacaggagaccaagggtccagaatattagttattttagcctttttactcagttgaaagagagagaaaaagaaagagagaattctccattgagggaactgtgccctgtggtgtgggtgtctggagtgtcctgttgagtgatgatgtccacaggtggcatcgctcctccctggacctaccttgggaggggggcatcttctcttcctgtcgtagtacctcttccatggcccccagcacttcaggcacccaaggacggcaattaccacaattgttatagaacattttaaaattcattatgggaaaagatgccttacacaaaccagaaaatgtaacagtctaaggtgaaaatatttaccatttggatatctaaaacaagatacaatccaaaataagaatcttatgcccagaccagggaagaaaatccaaagaaatacaaataaaggacattaccaggaatgtatagaaggagaaaaacagatgtcaataaatatttgaaaagatggtggtattcatttataatcaaataagtgagaataataaaacaaaatcatggccaggcctgtgactcacacctataatcctggcactttaggaggcttaggaaggaggattgtttgaaaccaggagctcaagaccatcctgggaaacatagcaagactctatctctacaaaaagaaaaaaaagaaaaaaacaatttcttcctaatcagattaccaaagtaatgggaaaattgataacttgcttttggctatgttaagaaaaaccagaataatgtatccccttgaaagattttgaagttaggtaaaaaaaaaaattgagaaaacatgacataatcataatattaaatttctgacattttgttatttaaaacttactttaaataggagagtaagatctacctgaaatgttctttattggattggtaatcatggaaaagatataaaattaaatattcattatttagaataacaatagattagttccatggaacactatgcagacatgagataaaatcgacaataattgacaaaaataaaaatagctaatgtttattaagtattcagtcttgctacacacttttccccagtaacatacgtatattccactgtttaatttgaaaactatatcatgtgacgatcattatatagagaggaaagtaatgcattcaggccaacttgtccaaggtcacatgactgggaagggacagagccttatatatgcgctctgaggcacgctggctgcagatcatgacattcagtgttgcaattaatgtatgtagtttttgcctggagagtatagaggactcactgcataactactcaaacatgtcaccataagcttgtcagtttggcaaatgttgaagaaaaacaataacatccagggttcgagtttgagagaggaagacaatgggcattatcaaacaaagtcaggactgaattgctaaatgttgctgagggtgattgtcaagatttatcaaaacatatatatgtgtagcccaggatgccacatttagagtcctagagggttacttacaagaagactcaatgattgcacgaagtaaaaatacaggaagtctttttcatctttgtgtttctggtggaactcagggaaatcagtcattgtcaggatacagacagaatgagtaggaaatctacgagttgacctatgtctctcaagatccaaaacaacttcccacccctcccctctgtctgctcagtgccacccctctcccaggaatcattggtcatgagactgagattgcatatgtttgatgctataggaggcaatgaccttcaaggacgtggctgtggtcttcactgaggaagagctggggctgctggaccttgctcagaggaagctgtatcgagatgtgatgctggagaacttcaggaacctgctctcagtgggtgaggacaggcaccctctgtaacagaacgtcaggccccagaggtggctttgtatcctagggtacaaagtttcaagtcttaattagtaacttgaacctatggttcaagtttgagtgtgcagtaagaacctaaatttctggtaaactttaccttgatattacctagaatgtgttgggattaagcatgtaagtttgcctgtttgcaggacatcaagcattccacagggatactttccacttcctaagggaagaaaagatttggatgatgaagacagcaatccaaagggaagggaattcaggtaagaatcaagcaactgtgaatccctgtatgtctcttccacctgtttcacttctgtccatgctcaaatccattgccctggcctaaatggccaaacctctttcttggattattgacaaccatcttacacctggtggccctgccacccgccttcacatcctgacatctgttctcatagcagccaaagtgatccttaggaaatgtaagtcagattgccattcctcagctcaaaagcctgtttggcttatttttattaaagttacaacctctttaattgacttttagagaccctgtgatctgctcttcatcccctccctgccacctctctaactacatctcctgtcctctccttcttgctctgtctttaccagccactttattctccctgctgtttctctgtcctcccaagggcactgtgttgccttttgctggtacccagtgaccacagactgagcagactgagagacaaacatttattatttttgtgttctttagggatgaagtctgatacatctcactgggcaattatcaagttgtctgtagggcttcatgttttctggatgctcttggggagaagcctttactttagtttatcagtgtctaggcactgtccatactccttggctcttgcttcccttcctccatcttcaaaggcagcaacttgcatccccatagtcatgctccctctgccactcttcttatgccttcctctttcaccttttgggtcccttgtaattgttttgatcactcctggataatccaggatgatctttctgttctctggttaactgactagcaaccttaattgcatctacaacctctgttcccctgctgtataacaacgtgatcataagtcctggggactggatgtggacatcttttaggaaccattattctgtctctacagaagcttctgtctcagcccttacttgctcatctcagtcactgggatactctgtcacctcaaaaccttctggcatctccttcagttattcaagtttcttttcagttttaaagtcatgagagaagccatcctaaaccactctctttataattccattctattttgattcttcttgtgctctcttgtaccaagtctcacatacttctgtttatctgtcacttctacatgctggactataatgtctaaggaattttaactcttcgtggctgtattttcagtgcctagaatggtcctggtacatggcaggtttccaaatttttgttaacctgatatatgagctaatgaatggggtgacttcactgtctcctgaaattatggagagaactaataagtgaaacacaaactacggtgaaagagagatattgcagaacatgttttttgtcttccaatggccatgtatttaattacaatgttcttagattccgttatttgattgccttgtgtgtttacggtggacccacatcccatggaaacttctaagcattctatttattaccatactgagctatatgccttccatatgacttatcctggagcttttcataggaagcatattcatttctggaaagaaatcatttttgaatgaacattctgatgtctactagtgagacagctcttctacaaggggaaaaaattctccattttgtgatgtgtcagataataaccagcttcccagctagctttcctttgagagatttacccatctgcagcccatttgcctttccaaagtctgcatgcacgtcactgaccccaggtttcttcttctcctgggtggggaagaatgaggaagagagcaacacaattcatgcagctaaacattgcctatatttctggtcatctttgttcaaaaatatgtatatttctgcaccttcattgtatacagatttaattgttaaaaacataaaagaatacagattttacaacataatttttcctttattttttagagacctagtgctctattttcaactttataacttggaaggaatcaggaaactgccctctcaaaatactgacatcctgaaagagactctctcttctccccaaaaacctcttaagtaacagtgtgttaaatatatccatattccagcgtgtaccattgggtacatatttacctattactgtttttccaagattcaaccttggaagttaactttccatttgactgacttaatttaggacttggtaatatcctgaccaaagttgtcaacatttttatgattgtgagtcatagtaagaaacacatctttcaccataaccaggacaaacatttttcatgcatgtagatgtctatgggttacttcagtaggcatttcatgaaatgatacctttcttgcttgtcatgaagatgtgatcatttcttttctagttctttttttctaaatgctcattagaaggttttaaatttattttatagctcactttttgtctatattcttccatttggaaataagtataaaggagtatttatctatatcatatattttctgccctcttttttcttctttttttatttttttgagacagggtctcactctgtcacccatgctggagagcattggcatgatctcagctcacagcaacctctgcctcctgagttcacatgattctcatacctcggcctcccacgtagctgggattataggtgtgcaccaccacacctggctaatttttgtatttttagtagagacagggtttcaccatgttaatcaggctggtcaccaactcctgggctcaagcaatctgcccgccttggcctctcaaagtgctgagattacagacatgagccactgtgcctagcctctggtcttttttattttaatgagagtctaatatccccacatggaaccaacccagggcatgacccctcaggcattctttttatcccaagtgttctcaccacctttcattgtctcatcaggagcatcaccctttctttacccctgtcaggtccaacctttcagattcccatcaaaactggttgtctgtttcttacctatctcagttaaccaaattattgttcacatctacagaaaaataaaattaaagatacatgttatgccaaattcttgtgtaggaatattatgaatatgtagatataaacactcctaggcctttgatattattgtgaagagtttaactggctgcacagtttagagcaagagtttacagaagatcgctctcacttcacaccaactgcaagtgtggggatttcccaaaactaccttcacattcagtaattacctagaaagataagcagaactcactgaatgcttttatactaaaagttacggatatttacagggtagagatgcacattacatttcaccaagagaaaaataagaaacagttctgggaagtaccaaatgaggatcttgtattgtattctccccatagagtaggatgcgttaaattcccagaattaaggtgtgacgtagagggtacagcgaatcagggaagctcacctgagccctgtattttttttttttttgagacggagtctcgctctgtcacccaggctggagtgcagtggcgcaatctcagctcactgcaagctccaactcctgggttcttgccattctcctgcctcagcctcccgagtagctgggactacaggcgcccgccacc[187 bp omitted]gccattatttgttgattgattcccatgtggctagtcagtctcctgggccactgattccatgtaacctaaagcctcaccttaaatcacgttgctctttgtgacatagggggcaccgacccccaaaggcgtggccagctacaaccctaaatcatattgtttcactttccagtgacctagttttactctcaagcaaacaaagacactctcctcaggcataaactcctagacattacctctcagatcctgaggaaaacatctagacctcattttgagtaaggttaatatctttactttgtaaggatacacaatataaacacaaatgtaccaagtcttgattatattacttttgtttaaaattggttttgattcatattttattatatacacaatttattagcttcataatttaccatgcaagattttagactgattaggaaattcactaggaagagtagcaggtataatgtttgtatcatattaattttattattgtcttttatttttattaaaaattttatttcagtagtctttttttattaaagtatatactggtttttggttacatggttgaattgtctaatggtgaagtctgagattttagtgtacccatcacctgagtagtgtacattgtacccaacttgtagctttttatcccttaccctaccttccaccctccccattttgagtctccatagtccattatatcactctgtatgcctttgcatacccatagcttaactcccacttataagtgaaaacacggtatttggttttccattcctgagttacttcacttagaataatagcctccagctccatccaagttgctgcaaaagacattatttcatttttttatggctgaatagtattccctggtgaatatataccatattttctttatccactcattggttgatgggcacttaggttggttccatatctttgaaattgtgaattgtgctgtaataaatataggcatgcaggtgtccttttgatgtaaggacttcttttcctttgggtagatagtagtgggattgctggatcaaatggtagatccacttttagttctttagagaatctccatactgtatttcatagaggttgtactaatttacattcacaccagcagcagtgtataagcgtttcttctcaccacacccatgtcaacatctattgtttttcgtcttttatttctatcaagtattttacatatgatacttggtttagttcgaaattggcctcatccaaaccaaagattatggtgcacttgaaaaatacaaactgaatgttgtctatactcatgagagtttcctgccatggcctaagtgaaatcttgataacactgaacaaaggcttcacttgtcctcatcttttaattctgtattctgataggagacaagatccaaactgagatggagactgtttcagaagcaggaacacatcaagagtggtccttccagcaaatctgggaaaaaattgcaagtgatttaaccaggtctcaagacttgatgataaatagctctcagttctccaaagaaggtgatttcccctgccagactgaggcaggactatctgtaattcacacaagacagaaatcttcccagggcaatggatataaaccatccttcagtgatgtctcccactttgattttcatcaacaattacactcaggagagaaatctcatacgtgtgatgagtgtggaaagaacttttgttacatctcagcccttcgtattcatcagagagtccacatgggagagaaatgctataagtgtgacgtgtgtggtaaggaattcagtcagagttcacatctgcaaactcatcagagagtccacactggagagaaaccgttcaaatgtgtggaatgtgggaaaggcttcagtcgtagatcagcacttaatgttcatcataaattacacacaggagagaaaccttataattgtgaggaatgcgggaaggccttcattcacgattcccagcttcaagaacatcagagaatccatacgggggagaagccattcaaatgtgatatatgtggtaagagcttctgtggtagatcaagacttaataggcattccatggttcacacggcagagaaaccattccgatgtgatacgtgtgataagagctttcgtcagagatcagcacttaatagtcatcgcatgatccacacaggagagaaaccatacaaatgtgaggagtgtggaaaaggctttatttgtaggcgagatctttatacgcatcatatggtccacacgggagaaaagccatataattgtaaagagtgtgggaagagcttcagatgggcctcgtgtcttttgaaacatcagcgagtccacagtggagaaaaaccattcaaatgtgaagaatgtgggaaaggattttacacaaattcacaatgctattcccaccagagatcccatagtggagaaaaaccatacaaatgtgtggagtgtgggaagggctacaaaaggaggttggatcttgactttcaccagcgcgtccatacaggagagaaactgtataattgtaaggaatgtgggaagagctttagtcgggccccatgtcttttgaaacatgagagactccacagtggagaaaaaccattccaatgtgaagagtgtgggaagagatttactcaaaattcacatcttcattcccatcagagagttcacactggagaaaagccatacaaatgtgagaagtgtggaaagggctacaatagtaagtttaatcttgatatgcaccagaaggtccacacaggagagagaccatacaattgtaaggaatgtgggaagagttttggctgggcctcgtgtcttttgaaacatcagagactgcacagtggagaaaaaccattcaaatgtgaagagtgtgggaaaagatttactcagaattcacagcttcattctcatcaaagagtgcacactggagaaaagccatacaaatgtgatgagtgtgggaagggcttcagctggtcctcaactcgtctgacccatcagagacgccacagcagagaaacacctctcaaatgtgagcagcatgggaagaacattgtacagaattcattctctaaagtgcaagaaaaagttcacagtgtagaaaagccatacaaatgtgaggactgtgggaagggctacaacaggcgcttgaatcttgatatgcatcagagggtccacatgggagagaaaacatggaagtgtagggagtgtgatatgtgctttagtcaggcctcaagccttcgacttcatcagaatgttcatgttggagaaaaaccttagtgatgtgatggtgcaataaagtcttcactcagtcttcatgaatgcagtctcatctgaaagttcacaaaggagagacacattaaaatatgaggcacatagtaagcacttccctttgagtattttatctctgaatccatgctggtgataaatttcacccattcttggaagagggaaaacatttgtttaagataacatcagtgcttcagccatagctcagcatgccccagtagtctcaggaccaccataatggagaatccttgtaaatggtgcaataaagcttcattcagaagtttgataattacagctatcattcaggagacaggccttagaaagagtaagagttcatgaatttaccagactaatggtggacatgtccaaattgatgtccactagaatgtaaactacatgtgtctttgctgctaagtcgtcacagccttaacattgattagcactttgtatgtgttcagtacttgtttgttaaatcaatgaaaggataaaacatatgtatggatttggatacaattttgtgtatccaaaaagggaagcctgcaaaaaataattctgggaaacatgagttgaaatgcagagtaaactcagtactgcaatccatagcaatattttgcatattattattttttcttttaaatttttttcttgatcagatttatcatattcattgaacattattttattgcacttggctcctggcttccccccatcctgtgctctgaagtcagagtattatttgtggctctatgaaatgtccattgcttgtatacggtataaatttaattatcttttgtagtttttctcacagtatagactgaaaaggtttggttaattttgcaataacagaccactgcatatttcacaattaagtgttttcaacagtattaaggcaagatttacagtaacacttttaaagtgccagatgtacattgacagaaattttcttagtcaatcctagattgatcatgatttgtgatttctatgcaggccttggtatgattgccttttaattgctgtacaatttcttttttttttttaacttctctggtataaaatattctaaatttgaatgacagcttttgtcaaccttcttatccaatattcttccaccaacgctatgaaacaggaagagaaaatggagtttggtaatttcatcaaatatattcattattgggggcaggagtaacatttaaatcctcctctttattgctggcagtaaaaatatgtcttttggagagcagaacatgccagaatgtataaggtgcaactgtttgatatgaaaaccataggataggaaactatgcctatgacactaaaactccaaaaagtagaagaccacattgatgatgtcactgcattttaaaatggaaagaacaagtgttcaagaacaggaatttgtgtgaattgcatttattcctataataatatgaactcaatgagatgatgacatagacacaataacaaaaggagaaaaacaatgtggctttttttagccttcataacctaatcaaataaatatctttgtgtgttttatgttcttttgagtgtttacatactgtgtaaatgaatatttttactgatctttgctggcaatgagtgtttgcaggcatttttccattttatacttccatgcatttttaatttttttatgccacgatcttttaaacaaccagctcttgtgtgaattaagagtgcgaactcattcattaccatggtggggacaccaatgtttatgaaggatctgcttccatgaccaagcaccttccaatagtcccgacctccaacactggaggtcatacttcaacatgagatttggaggggatacatattcaaactattgtcagatgttaattcatcaggtatacaccatagtaatatcttaagtgtgttaagttaaagtgatatattttctaaggtatagaacaaatagggcttatcacccccctacaagcaaagaaaatgtcacaatgcttagtgtgccatttttgatattggatgcaacttattgtttcgattgtgctactctgacttttatgagtgacccaaaaactttgacttgtcccagacaagagaagtttgtgtaatatgtcccagcttccacgtaagcttctctgccactaaaaccctgtgaccccgggggtccaaaagtgtttgaaatgtccgtggcagatagtatgtttgaagcctatggttggccctaattggagaatcaaaattcagatgcttagtattttgaagcaaatttctgccatcctctgcatatacttactctcctctggagaagaagcttttcattttgctagggtgttttgttttgttttgtttttgtttttgttttttgagacgagtcttgctctgtggcccaagctagagtgcagtggtgcaatcttggctcactgcaacctctgcctcccggtttcaagcgattctcctgcctca[134 bp omitted]gcctcccaaagtgctgggattacaggtgtgagccaccacgcccggccactaggggtcttaaaacggacagaacacttgaccacagaccaccaaattaacatgtgacttatgctttccatcatgaatcgggtgttgacccctgcacctttttaagttacatgtgcagattagtattccatttggaagtggtatatatgagattgtgtttgtgcaggctctgaagccacaggtaagtgcacctaatattcatctccctactcttgctgtattcagaatgagtgaatataaagagaagtcatctgaaattattgtgtctcagcagcagaaagaagtggaatacacggttggacgcggtggctcacgcctgtgatcccagcattttgggaggccgaggcgggtgaatcacctgaggtcgggagtttgagaccagcctgaccagcatggagaaaccccctctctactaaaaatacaaaattagccgggcgtggtggcacatgcttgtaatcccagctacgctggaggctgaggcaggagaatcgcttgaacgcgggaggcgaaactccctctcaaaacaaaaaacaaacaaaaaacaaccaaaactgaaagctggtaatgaaacaaatacgtatacacgaacatttgtagcaacactgttcactacagccaaaaggtgaaaagaagccaaatgtgcgtcaatgtatgaatggagaaacaaattgtagtataaacataaaatattcatctatgaaaaggaatgaagtactgatacgtggtatgatgtgaataacattaaaaatattatgctaagcaaagggagttagaaacaaaatgttccattcatttttatgatttgtccaaaataggtaatagaaaagagagaaagattcatgtttccccaggaatgggattatggacaacagtagtgattgcttagtgggcatggggttttctttgggtgataaaaatgttttgtaattcaagaggtggtggtttcacaatgaagcagctactttgtctgaggtttaaacccggggttcgtcgttaagcgccagaaaaatttaggacacggacacacaaaaactcctcagtttaggagcggaggtttaataggaagaagagaaagagaaacgggttcctccatagaggaaggggtctccgagcggaaaagggtcggctggcagtgaatgtgctgagttttacagaccagtttgaggaggcagtgtctgatttacataggggtcatagattggttcgatcagttatgacgtttacatagtgcgtggggaaggctggtcgccccaccctaatcttcttatgcaaataggcttcccagttgattggcccatcttgccagcttcttactgtgcacgtggctgacaaagagaagggaagatggagccgccatctttaacatgattggcacaactgctggtatctatgtctgcggcagctggattttacaggctgctcttccttaggaagggaaataatttggggctgcttttcattaaaaagaaaagccttaccgagggctcccataccctatctgcctaagtgatggcttcttaactcgtatatattaacaacactgtattcgtactagatgccattgccattgaattatgtgccttaaaataattttgttttgtgaattacacctcaaaaatattttttaaataataaaacgaccacgttaaaaacgttttgcatagcgaaaaacaagtcaaaggaaaaaagctttttggttgagcaatatttgatacaatgttaatatgagtatgtaaataatacttaacggaggggaaaaaactaaacactcaatagaaatgtgggcaaactatttgaccaattcacaaagactataatagtggcaacggaaaatatgcacggatgttccactttatttacaaaagaacaaatacaaattaaaactacatttagaaaccatttcttaccattagattagcaaaacttaactcctcgaagactgtgtcttctcgcttgttccctttccaataacactcctgttatcattggaggcgtttagacttcagaaattcctgtctattcagtattttctgtcctggaccagggagagagaaggacgactctcaggataacagttcacattccccactaggcaggcgctcgtggctttgggattcgttcccagtgggcacctcggagtggcaacgcttccccctgaagaatgagattttgagcgtttttccttcagcattcggaggagtgtaatccaaatgctctgtggagtcgtacacactggctccagaaggaggatacaagcaattctgggaatggtagtccagacgctcagtggagtagcggtcagcttggctccggcaggcgaatcaggggatttctgggaaatgtagtccagacgctcagtggagtctcggtcaatttgactccggcaggtggatcccagggaattctgggaagtgtagtccagacgctcggggtcgtcgcggtcagtttgtctcaggaattctgggaagtggagtccagacactcagtggagtagcgggccacttccgctccgttactgtgaggttgctgcagttttgtccctggtagtttgggtcagttccgcgagacccttctgaatttcctggacctacgcattggatccttaacgaactggtgatcgaattaggggaaaagaaacctcgtcggagagcagaggtttggcggagcggggccgctgttttcgttctcgtcagtggagccttcttgggcttggggctctcctcgcgtccccggggtgtttgggacttggtcgggtcgcgtctcgcctggttttagggtctccggggctctgagctcgcccactcggcctccctgcaccccacgcgcgtggccacttcctcgcgataaaacgctgggatgttacttaatctccttgggtctcccgttacagttctttaagatggggagtttaggaccatcctaatagaatcgttttgggaactgaaagcggtaacacaaatgagagccttaaagcagcccctgtcacttggtgactggtggtctcttgttaatttcccacgaagcctgtcaggtccccgggtggggtgaaactccagctgcaggggcaccggcccttctccctgattcctgcaagacgctgggtgatcccggacgccttctgacctctcttttaggaaggcgagggttgcatccacttccaggaggggagaggagcatttaacttttatggggcacggcgaccacggtcagagtgtttcacagccttctccttacccagcccgacctttccaaaagagctgcagggagggacttcttggcttctgagggcaaagctctacgtgagtgatccttggcttttttctttgacagagatgctcaccccaaccgagagtgtataggatgtgtcttcgggcatgggtgttgctttcagttgtcatgtttttctagtctttaatcttgaaagatagcatagctttcatcgttttttcttggtattttatccttgttatttttgaagagtatagatgaagttattttggtcaaagatgttcatttggagtttttctgatgtatttcacgtttaacttcaaaatatgcattttttgctggaataccacagaagtggtaaatctctctctctctttttttttcttgagacggagtttcgctcttgtcgcccaggctgtagtgcatggcacgatctcagctcattgcaacatccacctcctgggttcaagctattctcctgcctcagcctcccaagtagctgggattacaggtgcctgccaccacatccggctaatttttgtatttttagtagagaagggatttcaccatgttggccaggctggtctcagactcctgacctcaggtgattcaaccgccttggcctcccaaagtgtgggattacaggcatgagccaccgtgcccagcctgaagtggtaaatttcttattgcaacataacaggggccatatgtcagtttgtcacttcattggtgatctcaactttgttcacttggctaaagtcatgtttgtcagatttccgcattgtaaaattattttgaatttttttttttaccccaggaacacagattcaagttgctctcaatatacactccctaattttttagttaaataaaattttgtaaggagaaatacatttattagtgcacattctactgtaaaggtgaactctcccttctccttcatttgcttattcattcattcaactataaatattctatcagtgtagatccagaatccagtcttattaagttaaatgacatgtggatgaacaattaccaatgctttgtccaactttattgaggtgtattctacatatcatagaaactacccatttcgtgtgtacactttaatgatttttaggaactttgtggagtggaataaacatcaccataattcagtttaaataattttcatcccccattaagcctccttgtgctcacttatagttaatcctctttgtcacctcaaatatgcagagaccacctatctactttctcgttatatacacttgcctactctggaatttcatagatataggatcatgcaatatgtgggccttcctatgtgactggcttctttcacttagcataatgtttccaaagttcatgcgtgttgtagcatgaatcagtacttcattccttttaatttccaaataagattccattgtatggataggccacaatttgtctatccatgtacgcataggagggagtttgttggtgtgcagttttgggttactatgaatgatgctgttgggaacattcatgtgttaatttacaatacacattcgtgttggtggatggcatccctggccacactttcatgtctctttttctgccttccctggtactttccaggcaggattctgctttcccttggactgtatcactcaggactctgaatattccctgaaataggaggaaaaatgaccacgttgaaggtgagtagagcttgcctctcttgctgttaaaatttcttttatggagacttgttctgtcgccaaggctggagtgcagtggcctgattttggctcattgcaacctccacctccggagttcaagtgattctcctgcttc[131 bp omitted]ccttagcctcccaaagtgctggaattgcagatgtgagccaccgtgcccggccgtatttcttctcactactcatattctcacaggttcttctcagtcttgggaagacttagggagtacaacagagatatagcatgggacaaacagaatctagctcttcccgtgtgaacacctccaataatccttgtgtgaagcagcagttaagcagttatagcctgttgtgttgtgccaacacgagagccagcgtccacaggtggcactgctcctcccaggcaccattttggggtgatcttctttcttcctgacatgacacctactcagatgcacccagtgctccaggcacccaaggacagtgataaccatagtcatgatagaaaatctttactttcagtatggtaaagggtacctcacacaatgttaccagaaaatataacagcctagagcaaaaatattcactacttgtatatttgaaacagataaaatccaaaataagaatcttatgtacagaatagaaaaagaaaatccaaaggaatgtgaataaaagacattaacaggcaagtttaaaaggagaaattgagatggccaataaatatttgaaaaggtgatggtattatttataatcaaataagtgagactgttaaattcttcctaatatgattacaaaaatcatgggaaaattgataacctgctcttggttatggtaagacaaatcagtgtacacgtatcctcttgaaagattagggtttggtaaaaaattgagacctgatattatatgatcacaattttaaatatgcctatttattgacattttaattttcatttaaaattattttaaataaacagtagtaaaatctacccaaaatgtttttttttacaggattggtattaatgagcatatataaaattaaagattatttagagtagataaaaatagattatcaattctttggaatactatgcagacatgaaatgagataaaatagatggcaacaatgacaataataataaaaaaaattttaaaaagctagtgtttattaggtatttagtctgcactgatcaactttcccaatgctgcatgtatttccttgtttaatcattgaaaaaactataatatgaaaattattagagagggagtaaataggtgaacttgtccaaggtcatgtgaccaggaaggcacagagccttgggatgtgcttttaggcacactgtctgcagatcatagatcaatgctgcaatcaatgtatgtagtttatgccttgagagtacacaggatgtactgtatagctgtcccacacaggttaccacaagctttgttagtttggtggcagatattaaagaaaaatgataacattcagggttcaagtatgagagagaacaatgggaattatcaggcaagactgggactgaattgttaaatgttactggggcagttggcaagattcactgaaacctatatacgtgcagcccaggatgctgcatttagagtcctacagggttacttacaaggagactcagtaagtgcacaaagtaaacctacaggaggtcttttccatcactgcacttctggtggagctcaggaaaatccatcattatcaggata[133 bp omitted]gaaaccccatctctattaaaaatacaaaaattagccaggcatggtggcaggcacctgtaatcccagctacttgggaggctgaggcgggaggatcacttgaacctgggaatcggaggttgcagtgagccaagatcatgccactgcactccagcccgggcaacagagcaagactgtctcaaaataaataaataaataaaataaaataataaaaaaggaagtctgtgtgttgacctatgtctctcaagatccaaaacagcttctcattcctcccctctgtctgctcagtgccacccctctctcagtagtcattggtcatgagactgaggttgcatatgttcgatgctgtaggaggcagtgaccttcaaggacgtggctgtggtcttcactgaggaagagctgaggctgctggaccttgcccagaggaaactgtaccgagaagtgatgctggagaacttcaggaacctgctctcagtgggtgaggacaggcaccctttgtaagggaacatcaggaccaggagtggctttgtatcctagagtgttcaagtttgagtatgcattgggaacctaagtttccagtaaattttacttagatttttttctaggatatattggcactaagcacatgacttttcacgttcacagggcatcaatcactccacagagatactttccacttcctaaaggaagaaaagttttggatgatggagacagcaacccaaagagaagggaatttaggtaagaagcaagcaactctgtgtccttgtgcgtgactctcccatcggtttcacttctgtccattgcccagctctgttgtcctggtctaaatggccagacctctttcctgaattattacagctgactttcggctggtttccctgctcccacttttcccaccctgacatctgttttcctcatggcagccaatgtattccttaggaaagtcagactgccattcctcggctcaaaagcctttctggcttcttttttttttttttgagatggagtctcgctgtgtcgcccaggctggagtgcagtggtgcaatctcggctcactgcaagctccgcttcccgggttcacgccattctcctgcctc[224 bp omitted]tttagagaccatgtgatctgcttttcatcccccaccacctctctgactacatctcctgtcctctcccttttgccttgtccttccagccacgttgtcctccctaccgtttctctgacctgccaaggacactgtattgcctgttgtagtaaccaatgaccacacatttagtcgactaaacaacaaaaatttatcatctttctgttctttaggcctgaagtctgacacgtctcaccggacaattatcaagctgtctgtaggtgtttgtttctttctggatgctcttgaggagaagcctttattttggtttaccagtctctaggcattccttggctcttgtttcccttcctccatcttcaaaggcagctactttgcatttctgacccttcttccatagtcatgctcactctgccactcttcttatgcctctctctcctgcctttcaggttccttgtaattgtgttggttacccctggatgattcacaatgacctctctttcttgttagctgattagtgaccttaattgcatctgcaatcccagtcccccttgctgtgtaatataacatgttcataggtcttgggtactggatgtggacatcttttatgaatcattgttctgtctactactgaagcttctgcctcagagcccttacttgcttttctgtctgatcagaatactctttcacctcaaaactttctggcttctcctttaagcatattcaagtctctgttcagttttagagaggccatttccaaccaccctatttaaaatactattctaggccaggcgcggtagctcacgcctgtaatcccactactttcggagaccaaggtgggtggatcactgagatcaggagtttgagaccagcctggccaacatggtgaaatcccatctctactaaaaatacaaaatttgccaggcgtggtagtgtgtgcctgtagtctcagttactcgggaggctgaggcaggagaatcacttgaacccaggaagcggaggttgcagtgagccgagatggcgccaccgcactccagccttggtgacaaagtaagactctgtctcaaaaaaacaaacaaaacactgttctatttttttcttcttgtgctgtcttgcactgtgtcttatatatttctgtttacctgtcacttttacccccaggaatgtgatgtctaagaggatgaattttagctgttttgctcatggctgtctattcacaggctagaaggtattgttctggtacatggcaggtatctaattatttgttatcctgataaataaattaatggatgaggggaacttcagtgtctccaggaatcatggagatagatagctaataagtgatacacaaactagagtgaatgagagctattgcagaacatgtttctgtcttttgatggctgcctatctaattagaactttcttaggattccttgttgggatactatttttaggtatgtgcagttcacctacatcccatggaaacttctaagtgttctttttatggccacactgagtattatgccttctctctgacttgtcttggagctttatgtttttatttttattttttaaaaattttccacaagttattggggtataggtgatatttggttacataagttctttagcgacttgtgagaatttggtgcgctcatcacccgagcagtatatgctgcaccatatttgtagtcttttgtctctcgccctcctcccactctttcccgcaagtccccaaagtccatttctctcttttttttttttaagcagagtctcgctctgttgcccaggctggagtgcagtggtgccatctcggctcactgcaggctccgcctcccaggttcacgccattctcctgcctcagcctctcaagtagctgggactacaggcgcccgccacg[175 bp omitted]tcagtgagaatatatgatgtttggttttccattcctgagttacttcacttagaataatagtctccagtctcatccaggttgctgcaaatgctattaattcattcctttttatggctgagtagtattccattgtatataataccacagttttctttattcactcgttgattgatgggcatttgtgttggttccacgattttgcaattttgaattgtgctgctgtaaacatgcatgtgcaagtatctttttcgtgtaatgacttcttttcctctggatagatacccagtagtgggattgctggatcaaatggtagttctacttttagttctttaaggaatttccacattgttttccatagtggctgtactagtttacattcccaccagcagtgcagaagtgttccctgaacaacacatccatgccaacatctactgtttttttgatttttgattatggtcattcttgcaggagtaaggtggtatcgcattgtggttttgatttgcatttccctgatcattagtgattttgagctttttaaaatatgtttgttggccatctatatcttcttttgaaaattgtctattcatgttcttagcccactttttgatggggttgtttggtttttttcttactgatttgtttgagtttgttgtagattctggatattagtcctttgtcagatgtacagattgtaaagatattctcccactctgtgggttgtctgtttattctggtgactgttccttttgctgtgcaaaagctctttagtttaattaggtcccaattatttatctttgtttttattgcatttgtttttgggttcttgatcatgaaatccttgcctaagccaatgtctagaaggatttttccaatgttaccttctagaatttttatagtttcaggtcttagatttgagtccttaatctatcttgaattgatttttgtataaggtgagggatgaagatccagtttcattctcctacatgtggctagccaattatcccagcatcatttgttgaaaagggtgtcctttcccccactttatgtttttgtttgctttgtcgaagatcaattggctgtaaggatttgggtttatttctgggttctctattctgttcctttggtctatgtgcctatttttataccagtaccatgctgttttggtgactatggtcttatagtatagtttgaaatcagttagtgtgatgcctccagatttgttctttttgctttagtcttgctttggctctgcgagctcttttttggttccgtatgaattttagcattttttttctaattctatgaagaatgatggtgatgttttgatagggattgcatttaatttgtagattgcttttagcagtatggtcattttcacaatattgattgcacccatccatgagcatgagatgtgtttccatttgtttgtgtcatgtatgatttctttcagcagcattctgtagttttccttgtagaggtcttttgactccttggttaggtgtattcctgagtatttgattttttttgcaactattataataggggttgggttcttgatttgattctctgcttggttgctggtggtgtgtagaagagctactgatttgtgtacattaatcttgtatccagaaactttgctgaattcttttatcagttccaggagctttctggaggagtctttaggattttcaatgtagatgatcatatcattagcgaacagtgacagtttgacttcctctttaccgatttgggtgccccttatttctttctcttgtctgattgctctggctaggacttccagtactatgttgaggagtggtgagagcagatgttcttgtcttgttccagttctcagagggaatgctttcaacttttccctattcagtgttatgtttgctgtgggtttgtcatagatggcttttattacattgaggtatgtcccttgtatgccgattttgtgagttttaatcataaagcgttgctggattttgtcagatgctttttctacatctattgagatgatcaagtgattttcatttttaattctgtttatgtggtgtatcacatttattgacttgggtatgttaaaccatccctgcatccctggcatgaaacccatttgatcatgatggattatctttttgatatgttgttggattaagttacctagtattttgttaaggattttagcatcaatgttcatcaaggatatcggtctgtagttttcttttttgattatgttctttcctggttttggtattagggtgatgctggtttcctaggatgaattaggaagggttccttctttctctatcttgtgaaatagcgtcaaaagaattggtatcaattcttctttgagtgtctggtggaattctgctgggaatccatctggtcctggactttttttgtttgtaatttttaaattaccatttcaatctcatggcttgttattggtctgttcaggatatctaatttttcctgatttaagccaggagggttgcatttttccaggaatttatccacctcttccaggttttctagtttatgtgtgtaaaggtgttcacagtagcctagaatgatcttttgtattgcagtggtgtcagttgtaatatctcctgtttcatttcttagtgaggttatttggattttctcgcttattttcttgggtaatcttgctaatggcctatcaattttatttatcttttcaaagaaccagctttttgtttcatttatcttttgtattttttgttttgttttgttttgttttgttttgtttcaatttcatttatttctgctctgatcttggttctttcctttcttctgctgggtttgggtttggtttgttcttgtttctctagttccttgaggtgtgatcttagaatgtaagtttgtgctctttcagtctttttgatgtaggcatttagggctatgaactttcctcttagcaccatcttagctgtatcccagaggttttcatgggttgtgtcattattgtctttcagtttgaataattttttaatttctatcttgatttcatttttgacccaatggtcattcaggagcagattatttaatttccatgtatttgcatggttttgaaggttcctcttggagttgatttccagttttattccactgtggtctgagagagtgcttgatataatttcagttttcttaaattaattgaggctcgttttatggcctatcatatggtctctcttggagaaagttccatatgctgttgaataggatgtgtattctgtggttattggatgaaatgttctgtatatatctgttaagtccatttgttgcaagacatagtttaaattctttgtttctttgttgactttctttcttgatgacctgtctgatgctgtcagtggggtattgaagtcccccactattattgtgttgctgtctaccacatttcttaggtctattagtaattgttttataaatttgggagttccagtgttaggtgcatatatgtttaggattatgatattttcctgttggacaaggccttttacattatataatgtccctctttgtctcttttaactgctgttgctttaaagtttgttttgtctgatatcagaatagctacccctgctcatttttggtgtccatttgcataaaatgccttttccacccttttactttaagtttatatgactccttacatgttaggtgagtcacctgaaggcagcagatggttggttggtgagctcatatccattctgcagttctgtatcttttaagtggagcatttaggccatttacattcaatgttagtattgagatgtgaggtgccgttgcattcatcttgctatttgttgcctgtgtactttggtttttgtatttttttgtttttgctttttaatatgtgtttttgttgtataggtcctgtgtgatttatgctttaaagaggttctgttttgatgtgtttccaggatttgtttcaagatttagagctccttttagcagttcttgtagtggtggcttggtagtggcaaattctgtcagcgtttgtctgaaaaagactgtatcttccattcatatatgatgcttagttttggtggatacaaaattcttggctgataattgttttgtttaaggaggctgaagatagggccccaatctcttctagcttgtagggtttctgttgaggaatctgctgttaatctgataggttttcctttataggttacctggtgcttctgtctcacagctcttaagattctttccttcgtcttaactttggataacctgatgacaatgtgcctaggcaatgatctttttgcaattaatttccaaagtgttctttgtgcttcttgtatttggttgtctaggtgtctagcaaggctgggcaagttttcctcgattatttccccaaatatgttttccaagcttttagaattctcttcttcctcaggaacactgattattcttaggtttggtcctttaacataatcccatacttctttgaggctttgtttatattttcttattcttttttctttgtctttgttggattgggttaattcgaagaacttgtcttcaagctctgaatttctttcttctacttgttcaattctattgctgagactttccagagcattttgcatttctataagtgtgtccagtgtttcctgaattttttatttttttttatttaagctatctatttccttgaatatttctcccttcacttattgtatcattttttggatttccttgtgctgggcttcacctttctctggtgcctccctgattagcttaataactaacctcctgaattccttttcaggtaaatcagggatttcttcttggtttggatccattgctggtgaactagtgtgatattttggtggatgttaaagtgccttgttttgtcatattaccagagttggttttctggttccttctcatttgggtaggctctgtcagaggtaaggtctagggctgaaggctgttgttcagattcttttgtcccacagggtgttcccttgatgtagtactctcccccttttcctatggatgtggcctcctgtgagccaaactgccgtgattgttgtctctattctgggtttagctacccagcaagtctacccagctctgggctggtactgggggctgtctgcacagagtcctgtgatatgaactgtctgtgggtctctcaaccatagatatcagcgcctgttccagtggaggtggtgggggtgtgcaatggactccgtgaggtttcttagctttggtggtttaatgctttatttttgtgctggttggtctccctctaggaggtggcactttccagagagcatcagctgtggtagtatggagaggagccagaggtggatgaggccctagaactcccaagattatatgccctttgtcttcagctaccagggtgggtagggaaggaccatcagggagggggagggctaggtgtgtctgagctcagactctccttgggtgggtcttgctgtggctgctgtaggggatgtgggtgaggttcccaggttactggagttgtgtacctaggaggattatggctgcctctgctgagtcatgcaaattgtctgggaagtaggggaaagctggcagtcataggcctcacccagctcccatgcaaaccaaagggccggtctcactcccaccatgcccccactaacagccctgagtctgtttccaggcagtgggcaagctgggcttgagaccttgccccaggctaccacctctcagctgcaaaagaaaagggcttgggtcttcccctgcctgtgagtctgcacactggattcacaccctcccccaagttctggccaggaggcttcttgcctggttcaaactgttataaagttcagctggatacttctttctccttgtggagttccccaccccctgctcctctggctgccttcctgatggatccctgtgatgccaggcaagaatggcctgcttagggacccaacgaggtcccaaggcctttctgttgctttgtctacccctgtatcttactcagctctctaaattgactcagctccaggtaaggtcggaaacttctcccacaaacagaccttcagtttctccagtgagggtgtgtgttcagtagaggaggctttttctcacttccacagttggggcactcacagtatttggggtgtctccagggtcctgcaggagcagtccacttccttcagagggtctgtgggtcctcttgggattgctagtttgtttttgcagttgatctggaggtaaaattcgcaatgggagactctgtatgccgcactgtccgtctgagttggagctgcaatctagtcctgccttccgtccgccatgatgatcttgtcttggagctttttgtagggagaatattcatccgtggaaagaaaccttttattttatttttctttctttattttattttattttattttttgagacggagtctgcctctgtcacacagactggagtgcagtggtgccatgtcggctcactgtagcctccgtgtcccgggttcaagtgattctcctgcctcagcctcccaagtagctggtatatgccaccatgcccagctaatttttttgtattttttagtagagacagagtttcaccatgttggccaagctggtctcaaatacctgacttcaggtgatctgcccacctcggcctcccaaagtgctgggattgcagggaatgagccaccactcctagccaaaaaaaaccttttcaaaggaagattctgatgtctccttctgaaacagctctcctatacaaggggaaaaaactttcaattctctgatgtctcagaaaataaccagctttccagctacctttccttcgagagatttacccatctgcagcctgtttgcctcttccaatgtacatcaccaatgtacatgtacatcaccaacccccggtttctctttccttctcctagagaaagaagaatgaggataagggtgacacaagtcacacatctgaatgttgcctgtatttctagtcatctttgtttgatagcgtggtatatatttctgcatctttattttttacaaatttgttaaacatgttaaagaatacagatttcgtacagtcttccttttctttgtatagagacatggtgctgtattttgaactggtgaactttatatcctggaaggaatcaggaaactgccctctcaaaatgttaacatcctgaaagagactcctccttcttcccaaaaatctcttatttataagggatgatgttttaattatatccatgtactaatgtgcaccagtaggtacacacttacttactaatgtttcctaagattcagccattgaaaattaactttccatttgattgatttacttaattcagaatgtggtaatatcctgaccaagattttcaatgttttatgaccatgagccatagtaagaaatacatctttcatcatcaccaggatgaaaatattttgtgcatgtagatgtgtatgagtacctttagtaggcatttcatataatggcacctttcctgtttgtcacgatgctatgataatttctattctggttctttttcctaaatgctttttagaaggtttcagatttattttacagctcactaagagtctgtagtgtttattttgaaaatgggtataaaggtctgtttctttacatcatattttttctgctatctgttttcaatgagacagtccaataacttcacatggaaccaatcagggcatgaccccttaggcgttcttttcatcccaggtgatcttaccaactttcattgtctcatcaggatcatccccctttgtgtatttctgtcaggtccagcctttcagattcccatcaaaactgaaggtttctgatccttttctatttcaggtaaccaagttattgttcatatcagtacagacaaatgagattatacatgttctgcaaaaattcttgtacaggaatactctgaaaatgtagacataaatactcctaggtatttgatatttagtattgtgaagagcttaaccaattgcaaagtttaaagtgacagctcacagaagactgctgtcactgcataccaatgacaaattcagtggtttccccaaattattttcatgttccatattcttaaaattatgggtttttataggggaaagatgcatattacaattaggagaaaaatcaagtaagacagagtccagggaagtatcaaatgagaactttttattgtactctccccatgaaatcaggatgcattacatccccaagattaaggtgtgacattagacgggaggagagcctatcagggaagctttcctgagccctggtattcagagtaatcgttgtctgttaattacatagccattattggttgatttctttcccgtatgagtagtctcagtctcctggttgactgattccacatgacctaaagcctcaccataaatcacattgttggtctttctcacatagtgagcaccacattctcctcataggtgtggccacccataatcctaaatcgtagaattacaccgtccagagtgacttactagacctactacctccaggcaaacaaagacactctcctagggcatgacattttaaggactgagagattgcctctcagatgctgaggacatcacccaggcctctttgtgacttaggataatttctttacttcataaggatatacaatacaaactaaaatatacaaagttttgacgatgttatggcttctccttaaagttcacatttgattcatatttcactgtttacataatttattagttacataatttaccatgcaaggttttatttctaccaagtatttcacatatgacacgtggtgtggttctgaattggtctcatgcaaaccagagtccatagtgtacctggaaaacacattggctgggcacagtggctcaagcctgtaatcccagcactttgggaggccaaaatgggagtatcacttgtggccaggagttcaagaccagccttggcaacatagcaagaccttgtctctacaaaaagtgtaaaaattagctagttatggtggtatgtgcctgtagtcctagctactcaggaggcagaggtgggaggatcacttgagcccaggaggtcaaggctgcagcgagccatgattgtgtccctgcactccagcctgggtgacagagggagacactctctttaaaaaaggaaaatacagggctggg[138 bp omitted]gtggcgggcgcctatagtcccagctactgaggaggctgaggcgggagaatggtgtgaacaacccaggaggtggagcttgcagtgagcggagatcacgccactgcactccagcctgggggacagagcgagactccatctcaaaaaaaaaaaaaaaaaaaaaaaaggaaaatacaatctgaacattccctatatttattaaaatttcaggctatgtcctaagtatgaaatcttgataacactgaataaaagctttacttgcccacatctcttaattctgtgtcattataggaggcaagatccaaatggagatggagactgtttcagaatcaggaacacatgaaggcttgttcagtcatcaaacctgggaacaaatttcaagtgacttaaccaggtttcaagactccatggtaaacagctttcagttctccaaacaagatgatatgccctgccaggttgatgcaggactatctataattcacgtaagacagaaaccttctgagggtaggacgtgtaaaaagtcctttagtgatgtctccgtccttgatcttcatcaacaactacagtcaagagagaagtctcatacatgtgatgaatgtggaaagagtttctgttatagctcagctcttcgtattcatcagagagttcacatgggggagaaactctataattgtgatgtgtgtggtaaggaattcaatcagagctcacatctgcaaattcatcagagaatccacactggagagaaaccattcaaatgtgagcagtgtgggaaaggctttagtcgtagatcaggactttatgttcatcgtaaattacacacaggagtgaaacctcatatttgtgagaaatgtgggaaggccttcattcatgattcccagcttcaggaacatcaaagaatccatactggggagaagccattcaaatgtgatatatgttgtaagagcttccgtagtagagcaaatcttaataggcattccatggttcacatgcgagagaaaccattcagatgtgatacatgtggtaagagctttggtctgaaatcagcacttaatagtcatcgcatggtccacacaggagagaaacggtacaaatgtgaggaatgtggaaaacgcttcatttataggcaagatctttataagcatcagatagaccacacaggggagaagccatataattgtaaagaatgtggaaagagcttcagatgggcctcaggtctttcaagacatgtgcgagtccacagtggagagacaacattcaaatgtgaagaatgtgggaagggattttatacaaattcacaacgttattctcaccagagagcgcacagtggagaaaagccatatagatgtgaggagtgtgggaagggctacaaaaggaggttggatcttgactttcatcagagggtccacagaggagagaaaccctataattgtaaggaatgtgggaagagctttggctgggcctcgtgtcttttgaatcatcagagaatccacagtggagaaaaaccatttaaatgtgaagaatgtgggaaaagatttactcagaattcacaactttatacccatcgtagagtccacagtggagaaaaaccattcaaatgtgaagagtgtgggaaaagatttactcagaattcacaactttattctcatcgcagagtccacactggagtaaagccatacaaatgtgaagagtgtgggaagggcttcaacagtaagtttaatcttgacatgcaccagagggtccacaccggagagagaccttataattgtaaagaatgtgggaagagctttagccgggcctcaagtattttgaatcataagagactccatggtgatgaaaagccattcaaatgtgaagagtgtgggaagagatttactgagaattcacagcttcattcccatcagagggttcacactggggaaaagccatacaaatgtgagaagtgtggaaagagcttcagatgggcctcaactcatctaacccatcagagactccacagtagagaaaaactacttcaatgtgaggactgtgggaagagcattgtgcacagttcatgccttaaagaccaacaaagagaccaaagtggagagaaaacatctaaatgtgaggactgtgggaagcgctacaagaggcgcttgaatcttgatacgcttttgtcattatttttaaatgacacataactgttgtactcatttatggggtacagtgtgatagttaatgcaagtatacaatgtgtaatgatcaaatcagtgtaattaacatacctatcacctcaaacatttatcatttatttatgttgggaacccttaaaattcactgtcctagctatttgaaaataatacgttgttaattactgtcaccctgtagtggtgtaaaacactagaacttattcctcctacctgcctgtatttctgtattcattaaccaacctttggctaccaccctgcctcctcacctctaagaactactattctactctctacttctatgaagttaactttttgagcttccacatatgtgtgagaacatgtggtatgtatctttctgtgcctggcatatatcacttaatataatgccctgtaagtctcattcactttgctgtgagtgatagaattttgttgtttttcatggctaaatagtactctgatgtgtatatttgccccattttctttattcattcatccagtggacacttaggttgattacataccttggcctatttcttggctatcgtgaatggtgctgcaataaacatgggggggtggagataacactttaacatactgatttccttttctttggatatgtaccaagtatcatataatagtatgacatgactcaaaattaaggaataagattgtggaaattggttttcaaaaaaaaattctctagtttgaatatagagaaaaattggtgagtgtcttcagctgtcctcatacataatgcatgtgagctcgctttaagcataagtgaaggagtggaaaaatcctggagatagaaatcaaggggtatacatgtggatgtaaaaaatcaacaaagattcttttaagaaaaggtgtgtatgggtagggaacaatagcatgacagcagtgcggcctctaacagtctggaaccagttaggacaaagagcaggattgagcgccattccattcatagacaccgtggtgatattttgagtacattaggttaaaaggctttcttcagcaaaatctatctctagagatagatttgatttttataatcaaatctactagagatagatttgatttttataatcaaatctaccagagatagatttgatttttataatcaaatctactagagatagatttgatttttataatcaaatctactagagatagatttgatttttatacttaatgttctagactgtatcttttcaggatgctaggtactttatgaagatccatgctgtctcaatttgcatagtgggttggaggtccctaagacaatctctccagattctatgatttgctaagaggactcagaatatagttgtactcatgactatattatagtgacaggatacaaataatcagcaaagggaaaaggttcttgtataatatctggagggaatcagatgtaaatttgtaaagatcctttgtgcatggagtaacaggtctcaattcctccagtattgaattgtgactgtacttgtgaaatgtctacaatggaaattaattatcaacccgtaccaaaggttcttattggaactaatcatgtaggtaccatccctctggtacatatcaagattctagactccaagaaggggagcaagtgttcagaataacttgaaccatgcctaccagttatggaatggtggcaaccctctcaaactccgtgtttcctaacaccagctaaaggccagtcttataagcagtcctttctaagatttgcagtctcaggcctgttatattaactttttgtgcacatagtactagaaaactgttggctcagtcttctttttgttttgtgtgttttggtttttaactgtcaccgataccagaatagctcatctccaaggtaactgtaacagaacactcagcagattaaacagaaaatacttgcttattataattattaaaagtttggtagggtctatgtctgctctctggtgtgtcctggatcatcaacttggttacaacatggtgttaacatgtgggactgattgtgtttcttgttaatatttctgtttctcccaaccacgctgaatattaaatacctagttctatatctagtaccctgagcttatgtggggctaatattctttgccatttttcaccacagatttgatttcctttttcttttgtggacactggtgagttccctaatataactttgacttggttatattttcacaatcggtggggattattacagattatcatccttcctctgcatttgaaaaaggagggaggcttcaagtcaggttagttgaccttcctttgttggtcttattatccataacataataaataaattgatgaggatgggcatggtggctcacgcttgtaattccagcatttagggaggctgaggcggcgttttagaccagcctagccaatgtggtgaaacctcatctctactaaaaatacaaaaaatatgccaggtgtggtggtgtgcgcctgcaatcctagctactcaggaggctgaggcaggagaatcgcttgagcctaggaggcggaagtttgcagtgagccagaatcgtgccactgtactcctgcctgggtgatacagtgagtctccatctcaaaaaaataagtttatgagaagtctattaaattgttacataatctatataggtagaaggtttctatttcaagtgaaccaaagtgtaacttgaatcgtctaatgcagactcacagcccaaaaataaattccaagacatgtccactttacaaatccacaattcctttgatggggtgggagggcagttctggataaggatggaccctgctagattgcaaaaaatttacagcactaattttttccccagagatctccataaggacctatggtcatgaacttctgtgactgtgtactcaaaaagagaaataatcacacattttggcagtgactgaattcttgttttcaagtaggataaatccaaagagactcacactgagacacattataatcaaaaagacaaggaacatcttgaaagcagcagcatgaaagtgacttgtcatgtacaagagatcctcaataatatcatcaatggctctggccaggtacagtggctcatgcctataatcgcagcactttgggaggctgaagcaggtggatcacttgaggtcaggagtttgagaccagcctagccaacacggtgaaaccctgtgtgtactaaaactacaaaaattagccaggcgtggtggtgtacacctatagtgccagctactcaggaggctgagacaggagaatcacttgaacctggaaggcagagattgcagtgagccgagatcatgccactgcactccagcctgggtgacagagggagactgtctcaaaaaagaaaaaaaaaaaaaaaaaaagatcatcagtggatttctcagcaaacctccaaggccagatgatgtattaaagtgctggaaaaaaacctggtatattgaggattctatattcagcaaaactatacttccaaaatgagagatcaattaataacttttcagaaaaacaaaagctgagagaattgccagtagacaagttattcaagaattgaaaaggttgggaggctgaggcaggcagatcatttgaggccaggagtttgagaccagcatggccaacatggtgaaaccctgtctttactaaaaatataaaaattagccgggcgtggtcgtgggcgcctgtaatcccagctacacaggaggctgaggcaggagaattgcttgaacctgggaggtggaggttgcactgagccgagattgtgccactgcactccagcctgggcaacacagtgagactccatctcaaaaaaaaaaattgataaagggaatcaatccttcaagttgaaatgaaaggattttagacaataacttgaaatcatatgaaaatataaagatctatactaaaggcaattgcatgaagcaatacaaacaacattatgatagtaattttagtttgtaatcccagtttttattttccatacaacgtaaaagacaaatgcataaaaatgactaccaatctatgtaaataagtacacgatatgtaaagatgtactatgagatcagtaacagtgcgggaaggaaagagctgtgaaggagtagggtttttatatctgattgaagttaagttggtatcaatttaaaagactgttataactttaggatgttacatatacttttggtgactataaagaaaatatcaatgaaacatgcacaaaagaaaataagaagtgattcaaggcaaggcagggtggctcatgcccgtaatcccagcactttgggaggccaaggcgggtagatcatgaggtcaagagattgagaccatcctggccaacatggtgaaatcccatctctgctaaaaatacaaaaaaaattagttggggatggtggcacgtgcctgtagtcccagctactcgggaggttgaggcaggagaattgcttgaacccgggaggtggagatcttgtagtaagctgagattgtgccactgcactccagtctgggcgacatagtgagacaacatctcaaaaaaaaaaaaaagtgattcaaaattaatcactacaaaaaaagaactcaacacaaaggacaattgtaatgaaggaaatgagaggcaaaaacacaataggacatataaaaaacaaatttaaaatggtagtccttacctatgtataattagtttaagtgaaattaatgaaactccccaataaaaagatgtagtttgtcaaaatgattgaaagacaatatgtaattatatgctctgcacattagaattaatgacatgcataggtgaaaggcaaatgatggaaaaagatatcccatgtaaaaaaaataacagcacaggtagctatactaacagataaattagattttaagtcaaaaactgttaaacgagacattaaatattgctaaaaggttcatttcactaagatgaaacagttataaacatatgtgcaccaaatatcagagttccaaaatataaaatgtaaatactgacagaattgaagggagaaatatacagctctccaataatagtaagagactccctacctttctttcaaatgcataggacacccagacaaaagataaataaggaaacagataatttgaagaacattatacaccaattcaacctgagagacattgacataactctccgccccccaacagaatacacattttctcaactgcacatgaaacattcttcaagacagaccatatattaggccacaaaacaagtcttgataaatgtaaaagtttgacaccataaaaatatattttccaactacagtctagatcataataactagacatcaatagcagtataaaaagtgaaaaaagcctgaggcgagaggatcacttaagtctagaagtttgagaccagcctgagcaacatggtgagactctgtctctaccaaaaaaacaaaaaacaaaaaggctgggccgaggtgggcagatcacttgaggtcaggagttcaagaccagcctggccaacatggtgaaaccccggctctactaaaaatataaaattattcgggcgtggtggtgcatgcctataatcccagctacttgggaggctaaggcaggagaatctcttgaacctgggaggcagaggttgcagtgagccgagatcacgtcattgcactccagcctgggcaacaagagggaaactccgtctcaaaaaaaaaaaagtatatatttgctagttttgtcagctgagagggtcaagaataaaaaacactaaggtagcagcgatcatacctagcactcagttctttgtttctaactacattttccacaaataggaaccagaagtcctaggagaaatatctgatctcatggctagggtagggaaaatacccaatgaacttgaaaaatacctaatgaacttggaacacacagtatcagaaagtaaaccagtgcacaaagagctcatatcatgatgaacaggaggagccagaaggcaagaggggactgcttgaagaggattttactggcaaaatctgagacaaccagagaatcaaaatacataataacagtagtagatgtgaactcattaatataacaagaattcacaaatccacactggtataaacaaataaataatatagatggaaagctttttcttagagcataatgccaaaaaatcaacatagaatgagttggagtatctcagtttttcaccagatagtagtaactttttaggggaaaaataattttagagtgcagaattctggagagaaaccccttaatcaactgttcaagtttagcagcaccagtaatggataaaaactagtatctggtatatcctgagatcatgcactaaggacagaaattgatcataatccagaaagacataatcttgaatgttggaatcgctgaagatcaaaatgttaaaaatataaccctggaaaaaataattttaaattttttagaagatattgactgatttacatttctttcttttcttcctttttttttttgtttttttttctgagacagagtctcgctctgtcactcagctggagtgcatttcccttccttcctccctcccttccactttttttttttttttctgagacagtgtctcgttctgtcacccagattggagtgcagtggcgtgatctcggcctcccaggttcaagtgattcttgtacctcagcctcctgagtagctgggattacaggcatgtatcaccatgccacgcccagctgattttttgtatttttagtggagacagtgtttcactatgttggccaggctggtctcaaactcctggcctcaagtaatccgctggccttggcatcccaaagtactgggtttacaagcgtgagccactgcgcctggccgagatggagcatctcaataaattttgtcatttggaagggccgactagagcaacaatacagctgtaactagtatagaaatagcagtcagtcaattttcaaagagggggatgtgtggcattgtgtggttagcatagtaaccttgtttttatgtaaacacaattgtgaaaaggtatttttttagtttataaaatgaatctagaatgtgagacttcattttttaaaaaacaaaaatatagattgataagtgtattagtccattcccccattgctataaagaaatacgtgagtctgggtaatttataaagaggtttcattggctcacacagagtcctgcagcctgtaaaggaaacatggcagcatcagctcagcttctggggaggcctcaggaaacttacaaccatgctgcaaggcgactagggagccagcacttcacatggccagagtaggaggaaaagagcgaggagtgagatgctacacaattttaaacaagcagatctcatgagaactctatcaggagaacagcactagagggatggtgctaaaccattagaaacctccccggtgatccaatcgcctcccaccaggccccaactccaacactggggattacatttcaacatgagatttgggtggggacacagatctaaaccatatcaataggccaatgtatgtttatggggagaaaaaaatctggttatctttttttttttttttttttccgtgacagagtcttgctctgtcgcccaggctggagtgcagtggcatgatctcggctcactgcaacctctgcctctcaggttcaagcgattctcctacctcagtctcccgagtagctggaattacaggcacgcaccaccatgcccggctaatttttgtattcttagtagatatgggttttcaccatgtt[139 bp omitted]ttgctttattctattatttatttgtatcaaccaatgtaagccagattccaaattgctaactataatgacgatattttaaccaaaaaatataaaggaagaaaataaaatatgttccttcacgtataggatcctccttaatgctactgcattaaataaatcataggcattgggtgtctgacatcaatgccaagcgcttcaccagttatacttgctttgaagtattgggcaatttaagagcttctctgaaatttggtgtttttacctcttcagtagacataataccatgaaaagtgtaaacgaaagaagatagcttttccatgaggacagggcttccccactggccctctcaaatgatgattgtttttcctgccaaaccagtggtaccacagcgtctggagtaggggctggcaccttctttgttcttcattgcctctcccaaaccattgtacttgctcactcttccaacttttagttttggcctcatattatcagtttatagtaatcaatcatcaatcatctactgacccctaaaaagtcattccccatttagtccttgaagattgtatctcctcgcttgttctctttccaataatcctccgtagtcctgggaggcgtttagacttcaggaattgctgtctattcaatattttcgctcaaggactcaggcagagggaaggacgactctcagggtcacagtccacattccctaccaagcgctcagcgatataggattcgttccccatgggcagtgcgggaatcgtaggcaaggagcaccgcggagtcccatcgcttttccctgaagggtgagattctgaacgtttttccctcagcattctgagtgtaatccaaacgctcagtggagtcgtggtccatttgacccacgcagggggatccggggaattctgggaaatgtagtcccgccaatcagtggagtcgcgggcacttccgctccagggaagagggggcgattgtcacggcacattccacggtagtttcttccagttccgcgactcgcgggcccctcctaatgtcagggacttaagattggggctcgctgggacctggtggtccggttatgggaaaagaagcctcgtgggagagcagaggtttggtggggcgagggcggcggcttttgttgtgtcagcggagccttcttgggctggggctcccctcgtgtcccgcggcgggaggcggggggcattgggacttggttgggtcgcgtctcgcctggtttgagggtttccggggctctgagctcgcccactccgcctccctgcactccaggcgcgcagtcacttttttacagtgcaaggttggcgtgttaatctccctgggcctctccttgctgttctttaaaatggggacgttaggaccatctttgtagaatcgttttggtaactggaataggttacacaacacaaacagtccctgtcacttggtgagtggtggtttcttgttactttcccacgaaacctgttaggtcccccggtggggtcagagctccagcagcaggggcctcagcccttatctctgatccctgcaggacgctggacgatcccggacgccttctgacctctttttaggcaggcgagggttgcgtccacttccacgaagggaggggagcatttaacttttctcagggacagcgacccagtcaggatgtttcacagctttctccttccccagcctgaaaaaggactgcgcggactgacttcttggctactgaaagcaaagctccacgtgagtgtgacttgtcatttttcttttacagagactgtatctttgtagcatgtgtaatagggcatgggcatttataataattaagccttaattgctaacttcaattctaggggatttatacaattagatacgtttaagccgcaacgtgactctgtggagaggtactggtcatccaagtagtaagaggtgaaacttgggttggaacctaggcattcagggtcagagcccgagttgatcatctcttggatatattctcattgaggcagaggaactagctgtactcaggtggggaaagtaagttagaacttgattaaaggaccttaagagcaaggctaattgccttggagttttctcagtttttaaaaactgtcaactattttgtttcatttattacaaatatttcacattctaatagaaccgtatcactgtgaagcattcagaaattacagaaatacgaagatacaaaaattgtaattacctatgaaatcaggatgtaaagatagtaatggttaaatttctaatgcattttgttttagtggttccatgtttatattacttataaatgttttacaaaatttttattatacatttctcaatgtttttctatttatctgcttatccatggaaatttccagataaagagataataaactagtgacctgccatattctatcatgctcattcttattcttctcattattatttctcctatgactatttcctgattttttaaaaaaactttaacacagtaattatataattttaagtctatagaaaagttgcaaaaatagtataagagggcagggcatggtgggtcatgcctgagtcctgagttatggaactgaggcactcagggtcacagcccgagtaatcccagcactttgggaggccaaggcctgtggatcacttgaggccagg[224 bp omitted]gaggcaagagaatggtgttaacccgggaggcggagcttgcagtgagccgagattgcgccattgcaccccagcctgggcaacagcgcaagactctgtctcagaaaaagaaaaaaaaaaaaaaaagaaaacccgtctctactaaagatacaaaaattagccacatgtggtagtgcgcgcctgtaatcccagctactctggtggctgaggcatgagaatcgcttgaacccaggaggagaaggttgcagtgagccaagattgcaccactgctctccagcctgggcaacaagagcaaaactctgtctcaaataaattaaaataaaataaaattaatttttatgagtagatatacttgttagtgggcaacatactgtaaagaccagcatcccctgttcccctgtttgcttattcattcattcaaaagtaaatattctatcaatatggactcagaacgcagtcttgttaaattaaatgacatgtagattaataatttttttccaactttattgaggtgtattttatgtatcagaattcacccatttcaagtgtacaattcagtaatctttaggaactttgctgagtgtagtaatcatcatcatcatttagtttagatcattttcatcccccaattggactcctcttgcccatttacagttaatccccattcttatcctaaatccccatcaacaagtaacctactttctttataaacatttgtctgttctgaacgtttcatatacatgaaatcatacaatctgtggtttggtgtgcctggcttctttcactcagcatagtgtttccaaggttcatgcatgttgtagcatgagtcagtacttcattcctcttaatttccaaataagattccattgtatggatatgccaggatttgtctatccatttttccataggagggcattttggttgtgtgcagtttgggattattatgaataatgccaccgtgaccattcgtgtgctaattcacagtacacatctgtgttggtggggacatccctggccacgctttcatgtctctttttgtgtcttccatagtgttccaggcacgattctgccttctctcaaatggcataactcaggactctgcaaattcccagaaacaggaggaaaaatgaccacattcaaggtgaataaggcttgccactcttgctgttaaaattccatctcactattctcatgtttcctgaggaagactcaagaacaacgggcatttgagaacctgtttatgctaagtgcatccttctgccttttgagttgactttgtttttagatgttgtttattttattatttcagttgaccttctgtatctgtgggtttcacatctaggggttttgcgtctttgaattttgcatttgtggattcaaccaaccacagattgaaacctgagtctatgtaaagctgaccatacatattttccttttgcggttgattgagtctgtggatgtggaacccatggatgtggagggctgactgtagtacaaacactattttagataagggacttgagcatccacaaattatggtatcctcaggggtccttgaaccaattccccaagcgtattgagcgacaactgtatttattttatggagtagaaaaattggtgtgaatgaacagttctcctactttacttctctgcttacgtattagctgtttttattttcttatagtcttttcctaatgtgcattcataactatattggtattcatgatatatatctcatttttgttattttttccttaagtactaaataatgttcattttttgaggttatgccatatacccatttaattaatgtgcctttttatttttgactacttcccattcatggacatttaggtgatttaagaattttattgttttacataacactgcaatgacaattttcctacataaccgtttcctcaaaaatcaattctgaaaactttctgctgatttttttgtcaccacaacctctgccttctgggttcaagcaattctcctgcctcagcctcccgagaagctgggattacaggcatgtgccaccatgcccagctaattttgtatttttagtagagatgggactcctccatgttagtcaggctagtctcgaactcctaacctcagatgatccacctgccttggcctcccaaagtgccgggattacaggcatgagccacagtgactggctgtagatagaatactctaacatggcacagcacaacaggctataatgctgcttcacacaaataatattgttggagttttcatataggaagagctagattctgtgtgctttgtgcctcgatcatactttgtatgtattttatttactagtgtcttattgcctttataaagtaaccagtttgaccaaagtagtaggtaataaccttcatttaaaatgtccagtgacacggaagatttgccagtcacttgtgttctgttactgtatttattcagaacagcagaatgaggaggtttgtggtctcttcttcctcttaaacaggtgaaatatgagaaaccttctcagattggcatagaaagtcaggggtcagaaacattagccattccatttaagtgaaagtgagagacaaaaggaaacaaatatttctcaatgaatgacccgtggtgtgggtgtctggagtgccctgttgggtgataacgtccacaggtagtgggggacctcttgtgttcctaatgtggtggcacctcagatgcactaagatgctcagcactccaggtgcacaaggacagtgattagcacagtggttatataaagtctttaaattactctacggatatccccctcagatagtggtttctcgggtatatacccagtaatgagatggctgggtcaaatggtatttctagttctagatccctgaggaatcgccacactgtcttccacagtggttaaactagtttacagccatcattctactgtcaattctactaataagtggttcattcaacctctgcaccctcattacaacacaagaacatctctgaggagtaccctgaagcatggggatcagggggtgaggtttttggtaagtgttttagtgggtgtgacaaaagataccttacagagtattaagagaaaaacaagttggggcaaaaatatttaccacacaggtgccaaaaaagatgaaattcataataaacattggtattcatttataatcaagtaagtaagaataatagaattgttcttcctaattagattatcaaaaccattggaaaatttataacctgctt[137 bp omitted]acctatgcctcccgggttcaagtgattcttctgcctcagcctcctgagtagctgggactacaggcacgcaccaccatgcctggctaatttttgtatttttagtagagatggggtt[133 bp omitted]aggcaggaaaaaaggaagaaaatctgccattatgtggtcataatttttaatgtgctttttttctgatgttttattttttatttgcagttatttagtttaatttatttttttgggacggggtctcactctgtaacccagactagagtacagtggtgtgatcatcgctcaccacaaccttgattacctgggctcaagcaattctctcgcctcagcctcctgagtacctgggaccacaggcacacgccaccacatgcagctaattttttgtactttttgtagagacagggtctcaccatgttgcccaggctggtcttgaactcctgggctcaagcaatcctccatccttggcctcccaaagtgctgggattacaggtgtgagcgactgtgcatggcctgcaatcattttaaatacacacgaaggtaagatctgacagtcgggtgactcatgcctgtaatcccagaactttgggaggccaaggcaggcggatcacctgagatcaggagttcgtgaccagcctgaccaacatggtgaaatcccatctttactaaaaatacaaaattagctgagcatggtggcgcatgcctataatcccagctactcgggaggctgaggcaggagaataatttgaacccaggaggcagaggttgcagtgagccaagattgtgccattgcactccagcctgggcaacaagagtgaagctctgtctcaaaaaaaagaaaaaaaaaaggaaagaaagtaagatctacatgaaatgatgttctttgctggattggttataatgaaaacaatattgaaaattaaatattcattaattagaacaggtagatgcagatttcagttccctcgaataatatacagtcatgaaatgaggtgaaatagatgatgatggtaataataatagataatagctaatgtttcttaggtacttagtctgcgccatacactattccaaatgctatatgtagtttctttttcaacgtttgaaagaactctgtcatgtaagaactatcataccaagatgaaactaggtgaacttatccaagatcacacaactttgaagggtacccttgtgtgcactgaggcatgatggctccagatcatgacactaaatgctgcaggtaatgctggtgctgtgtgccctgggtgtacagaaggaaaactacatagcagttttagatatgttaccaaaagcttgttagtttggcagactttaatgaaaagggatagcatccagcgttcctatgtgagagaggaggaaggtgggtgttatcatgtatgttggttctgacttgctaaatgtttctggggcaattggtaatatttaccgaaaggtgaaacccgtgtggctcaggatgcgtcatttagagttctagatggttacttacaaatagactcagtgaagccacaaaggaattgaaggctattgttactgatgtacttttactgacactaaggaaaatcaaagtgtggcattggtaagatggaaggagaagggctgagaaatctacacattaagtctctgaaaatctggaccagctccccctacatactctccactttctcagtgctgtttcttttcaagagtttgttaaaaaggctgaagtaaggtgtgtttgatgttataggagggactgaccttcaaggatgtggctgtggtcttcactgaggaggagctggggctgctggaccctgtccagaggaatctgtaccaagatgtgatgctggagaacttcaggaacctgctgtcagtgggtgaggacatgagctttctaacactcaatgtcagtctcttggagtgattttgtgtcttcaggggttcaacactttggaggtcttgaattagtcgcctacatttgtagacctgactttcctatcagtagtttttagtgaaataaaatgagatagaaatatcagagttcactaaaattaatggaatacatagcaaataaaactggtaaattgcatgagtggtgtgagaacttgtgggaggagatttaatgaaaataaacgggggccaggcacagtggctcacgcctgcaatcccagcaccttgggaggctgaggcaggtggatcacctgaggtcgggagttcgagaccagcctggccaacatgatgaaactctatctctaccaaaaaataaaaaatacaaaaattaaccaggtgtggtggtgcatgcctcttatcccacctacttgggaggctgaggcatgagaatcgcttgaatccaggaggcagaggttgtagtgagcctagatcacgccactgcactccagcctgggtgacagagtgagactgtctcaaaaaaaaaagacattggttagaaatgtaattttagtaatgcaccaagatgtaacagtttttctgttgtttgagataacacctggagttttttgttttatttttaagaagattaatgagtgcagacagaaatgtgaggttagagtgaaggtttaataagcaaaagaagaaagctttttgccagcagagagggggacccaaatggaattccccctatgaggcaggggtttggggtttttatggactgggaaggggaaggaatgtgcttagtttgtgggctattttggagaaagtgtgacttagcttggcccggaaccttggcccaggaccaatcaggttgaagtaaagatatatagagaccggacttacagtttgaaaaaaagaaagtagagtgcccactggaacccactggagcccactgtacctatgcccacaaaaggagaagaaaccttttcctgggagcccgctgactatacagaggacaaaggcattcttatgccaggccttgctcctttatctgagcgagctggaggtatgtacaagcttttatccaaatgggctggaggtttttctatctgtgcagccgtgggcatgtctccaggcacaacaccctgtggtagttcccttattggtgcctgcagcttaaattttttttccaggctgctttttatgttatataaaaataagacactaacccatgggtcaggggctctccaaagacccttcccttgctgtctacctaaggcaagcgaactaactcctttcagaaataggtttttatagcacatatttatgtctatgtgtctggatcttgaaatactgatatttcttcattaggttcttctaaaagtgtttgaaaacactacttttgattgattgatcagtatacagtagtaattcaaattgccagtaagttcagttgtacctttagtgtgtttgttttaaatatgtgactttgcgtgttctagggcatcaccccttcaaacatgatgtattccttttagaaaaggaaaaaaagcttgatataatgaagacagcaactcaaagaaaagggaaatcaggtaagaaccaagcagctaagagtccttgtacgtgattgtccatctgttgtacttctctcccctgctcttgctgccatcgggtccaaattgccaaacctctgtcctggatgattgcaacagccttcgtactgggcgcactgcatccaccctcaatagtataaagtatgttctcctacaggcgttctccatatcatagctaaagtgatcctttggaaatgtaagtcagattgccattcctctacttaagaccttgtacagggctgggcacagtggctcatgcctgtaatccagcactttgggggccaaagcaggaggatcaggagtttgagaccagcctggctaacatggcaaaacctcgtctctactaaaaatacaaaaattagccaggcgtggtggccagcgcctgtagtcccagctactcaggaagcttagacaggagaatcgcttgaacccaagaggcaggttgcagtgagccaagatcgcaccgctacactccagcctgggcaacagagcgacactccatcttaaaaaaaaaaaaaatactctgaatggcttcttatttttcttaaagttgaagtctcttaaaggagcttatagagtcctgcgtggtctgctgttcatcctcctctgcgtctctgactacatctcctgtattctacctcttgctccatcttttccagccacatcatcctccctgctatttcccagacctggtaaggacattgctcgctctgtcgcccaggctggagtatagtggtgcaatctcagctcactgccacctccgcctcccaggttcaagcgattcttctgcctcagcctcccaagtagctgggattacaggtgcctgtaaccacgtccggcggatttttgtattttttatagagacagggtttcaccatgttggccaggctggtctcctgacctcaagtgacccgcctgcctcagcctcccaaagtgctgggattacaggcatgagccactgtgcccgacctggacactgcatttcttactgctgctgtaacatattaccccaaactgagtggattaaatgataaaaatgtattgtctttcagttctttgtttgaagtccaacatgggtctcactacgctgaaatcaagctgtcagcccgtccctgtttcttcccggaggctctagggaaggagaatctgtatcgttcccttatcagtgtgtaggggctgccaaatttcatagcttgtggccctcttcacagccagcaacagtgcttctctgatcattcttctatagttgcatttcccttttattctctcttcatcctttttccactttataaggaccctctaattgcactgggcccacttggataatgtagaattgccttctatttttagttcagctgatttgcaaccttaattccctctgcaaccttaattaccctttgtcataacctgacatattcttaggatgagaattagaacgtggattctttgggggttgattattctgccaactacagatacttctgcctcaaagcccttatttgcccttgtctttgcctggaaaaactcacctacaatcctctcggcccctctcttacttcatcctggtctctgctcagttttaatttcacagtggtggccttttctgacatccttactggaaatgccatcctttactctctgccctaccttctcttgtgtctcatagactttggtttacttgcttgtcccctctctctccccactggaatataatctccaagagtggaggaatttttttgtttgtttgtttattactctatcatcagtgcctaaatagtcctgttacatggcagatatctgttaatataaatatctgttggcataatgaaggcattaatggatggatgtgacctcactctaggggtcttgcagctaggacaggtcatacacaaaccaaaatgaatgaagggggttgcagaacgttatttgttttctgatggctgcacatccagtttcttctgccttaggtgcccttcacgtgaatgtttgtgtgtgcacttgaacctcataccatgaaaacttacaagcatcgtggttgtgaccacactttgagtaacaagccttcccagtggctttcctggaggcttccatcatatggaacacattcatttctgggaaggaataatttttgaatgaagattctgatgtctacttctgagatagctccccccacaagaagataactatttcctaaggtgtcagatagtaactaggttgcaaactgctttcctttcagcacactgcccatctgaacctcatttgcttcttccaaagtgcccatccgtatcactgcccccaggttttgcctcccctgtgccagaggtggaagatttaagatttgagtggcaaaagtgacacagctgaatgttgcctgactctctggttcaaaaatatgctgtgcttttattttctacaaatgtagtagccattaagcatatattaaagaatatagatgtcatacaatttttcctttatttttataaagacctggcttttatgttcaactagttgacattataacctgggaaaaatgaagaaacttcttgctcaaaattgtcacatcatcatagagacttgtcctcctcaaaaaaactacaatttttaagggtcagtttgttaaatctaatcatgtattcatcatatatatatatatatatatatatatgcgccaagagttacatactctcctatgaatattttcccaaggtgtcacggttggaaattgtctttccatttgaagcagtttgtttaattaaggaccaggtaacttctagaaccaaagtttttgagctcttttgagcatgagccatagcaagaaacgcatttttcattgaaattagaacaatgaaacaaacatttcatgtctgtatagattgatattatagctttagtaagcatttcagaaggacccctttcctgctggtggtagtactctgatagtttctatcctggttcttttattctgaatgcttattacaagcttttaaatttatttcacagctcactaaagggctacagtttttaatttgaaaaactgttgtgaaaggcccaacttacctacactgagagcttcagaaggaaccagtgtatagggcttcctgctttctttttatcccaagtgattcttgccaccttcaaattttcttattagcctcaccctggatatacctgtctcttgtacaacttttcagcttctctgcaaaattacaattttctgttcttttcctatttcaaataacatttggaaaagatgcttttctcctaggacttggcttaaattctcacacaaaaaaagtcaagttggggttcatttattcatttgacatgcatttattgagcattcactgtgacaggcacagttctggacaatggttataaagtaggaaagtgtaaaacgagtattatgtcaaaattagaaaatgcttccctcattgatgctgcattgtggtgggaaggacatacattaaacaaccagtaatttagtgtgtccagtggttaaaagtgctgtgaagaacatagacaaattcaagttgctagaggtgaattgggtgaagacaggattcattatttttcaatgagtaataaagcagccctcattggtgagctgacattgagcagagacccacaagacgtgaggaaccatccatctcgctatctgggaagagttcctccctgaatataactcctgctgtgggggtggctttcaaagtttacactgtgacatctttttcttctccctgtctccatctcaattgtgaaagattggagtctacttctttttcacttttttttttttctggaggtctaaattactgtcagcttttagaataatacatgttatcagttcaactttctttccctttagtcctcatgtaggaaacttgctgacagaagctaaagtttcaccatctgcttatctgctaatattttagtcagtatgtggttaggtacttgctcccagcctgcaagtcatgttaaccattccagtcacctggatattgaagtaactttccaataaaatgactcagggcagagttatatagacaccatttaacaaatgtctactgatacaaaggaggaggtagatttttttctctttttcttttttttttttttttttttttgagacaaagtctcactgtgtccctcaggctgaagtgcagtgataaaatcatggttcactgcagcttctaactcctgagttcaagcgatcctccatctcagcctcccaaatagtgttaactacgggtgcgtgccaccacatctggccaatttttttaaaagtttttttgtagggccagagtcttgctatgttgcccaggctggtcttgaactcctgggctcaagtgatcctccggcttcagcctcccaacatgcttggattacagatgtgagccactgcaccctgccaagaggcagcttttaaatgactattcctgcaggaggggagtaagtttttcctctgtaaaaatttccttagaggtacgtctttctgctaaacttttgtggaagagttcatttaaaaaataatttccaaatatttatatctctttatacaagattaaacattttggaatattattaaggataaacctttcagaagggtttaaacattttaaatctaagttatattagaagtggtcaagagtttataatagttgtcagctcatttaatgtctgtcaacacagaaaaataagattaagtgtatatgttatgcagaatattcaagaatatggttgatccttgaacaacttgggggttagggacaccaactcccctcacagtaaaaaatccaagtataacttttgactcccctctaaaactttactcatggcctactttgactgaaagacctactgataacatagtcaattaacacatattttgtatgttataatgtattgtatactatattcttacaataaaggaagaattctttattcttacaataaagagaagagaaaatgttattaagaaaattataaggaggaagaggaggggttggtcttgctgtctcagggatggcagagatggaagaaaatccatgtataagtgaacacatgcaggtcaaacctgtgttgttcaacggtcaactgtattttgaacatgtaaatataaacatttcaggttatttaataatttgaatatgtaacatgaacctaaactgcaaaatatttgattattttcttactttcccttgaagttcttgttgatttatattatctacatttttttttaacttttaatatttttaatagaggtacattcttgctttgttgcccagactggtctcaaacccctggcctcaaactatccttctgccccagcctcccagaatgctgggatatacaggcatgaccatgcctggcctatgctttttatatttagataatttactatttattattctacactgactttaaaattcgatggaaatggcagtacaatttgtatcatgttaatttttaaaattaactctgacttctaacttgtgtctcacataggagacttggtatggtctaatgcctggtagatagcagccaattggaccacctcttgatttatctaggcatggaaatcagagatcatgatacacagtggaaaagaccattacacaaactggaccttctctggatttgttaaaatcgcatgctctcgcctaagtatgacatcttgaaaacttttaacagagcctccacatctctgaattctctgtccttacagcagacaagatccaaagtgaggtggagactgttccagaagcaggacgacatgaagagctttactgggggcaaatctggaaacagattgcaagtgatttaatcaagtatgaagactctatgataagtatttctcggttccccagacaaggtgatttgtcctgccaggttagggcaggactatatacaactcacacaggacagaaattttaccaatgtgatgagtacaaaaaatccttcactgatgtcttcaactttgatcttcatcaacagttacactcaggagagaagtctcatacatgtgatgagtgtggaaaaagcttctgttacatctcagcccttcatattcatcaaagagtccacatgggagagaaatgctataagtgtgacgtgtgtggtaaggaatttagtcagagctcacatcttcaaactcatcagagagtccacactgtagagaaaccattcaaatgtgtggaatgtgggaaaggcttcagtcgtagatcaacacttactgtacattgcaaattacactcaggagagaaaccttacaattgtgaggaatgtggaagggccttcatacatgcttcccatcttcaggaacatcagagaattcatactggggagaaaccattcaaatgtgatacatgtggtaagaacttccgtcgtagatcagcacttaataatcattgcatggtccacacaggagagaaaccatacaaatgtgaggactgtggtaagtgtttcacttgtagctcaaaccttcgtatccatcaaagggtccacacaggagagaaaccttacaagtgtgaagaatgtggtaagtgctttattcagccttcacaatttcaggcccatcggagaatccacactggagagaaaccatacgtatgtaaagtgtgtggtaagggtttcatttacagttcaagttttcaggcccatcagggagtccacactggagagaagccatacaaatgcaatgagtgtgggaagagcttcagaatgaaaattcattatcaagtgcatctggtagtccacacaggggaaaaaccctataaatgtgaagtatgtggtaaagccttccgtcagagttcatatcttaaaatccatctgaaagcacatagtgtacagaaaccttttaagtgtgaagagtgtgggcagggcttcaatcagagctcacgacttcagattcaccagctgatccataccggtgagaaaccatacaaatgtgaagagtgcggaaagggatttagtcgtagagcagatcttaaaattcattgtaggatccacacaggggagaaaccatataattgtgaggagtgtgggaaggtcttcagtcaggcctcgcatcttctaacccatcagagagttcacagtggggaaaaaccatttaaatgtgaagagtgtgggaagagcttcagtcggagtgcacaccttcaagcccatcaaaaagtccacactggagaaaagccatacaaatgtggggagtgtggaaagggcttcaagtggagcttgaaccttgacatgcatcagagggtgcacacaggagaaaaaccctatacatgtggggagtgtgggaagcacttcagtcaggcctcaagtctccaacttcatcagagtgtccacacaggagagaaaccatacaaatgtgatgtatgtggtaaagtcttcagtcggtcttcacaattacagtatcataggcgagttcacactggggaaaaaccttacaaatgtgagatatgtggtaagaggttcagctggcgatcaaatcttgtaagtcatcacaaaattcatgctgctggtacattttatgaaaatgatgagaatagtaagaacatcagagagttgtcagagggaggaagttctacaaggtgattaaaaaaaaaaaaacagaactcatgtacaacctgaatgcttgtaattagatttcataggagggaaaaattttctttatcaacctctttgaatttatttgatttgtaacgctccacatttccacctagacttttttttgttttttattttttgttttgaaacagaatctcgctctgttgcccatgctggatgcagtggtgctatctcagctcactgtaacctccacttcccgggttcaagtgattctcctgcctcagtggattacaggtgcacaccaccacgcctggctaatttttgtatttttagtagagatggagtttca[132 bp omitted]aattacagtagcattctcttatttaaaatatttgttttatttaagtcagtgtttaagcaatagctcagcatatcccagtggtccagtgaccacacagctgagaacccttgttaagtggtacagtaaagcattctgtcaaaactttgacatttatgacatgttacctaggaaataggacttagaaaatgagtttgacctgggctttaaaaaagtatactgatgaaggtgccagaattgatgtccattagactgtaagctccatgggggcaggaactttgctaccgaatctatacaaccttaacattgactagtgcttgtaggtgtgctcaatacttgtttgttaactgaatcaaaaggagtaaatgcacaatatttgaacattgtatccaaaggaagaaacctgcgaaataaaattatttgcagaaatgaacatttgttgaaatgcagaaaaccactggatactgcagcctacaatattaatatgatattactcttttacagttgacacctgtcctctctgtagtctcttctctcaaatttggttcttattgagagcctgtctagtttcccaaaggttttataaaacataagttgaagtacctttatttttaattttatttttgagacaggacctcgctctgtcaccgaggctggagtgcagtggcataatcatggctcactgcagcctcgtcctcccaggctccatccatctgcccatctctccctctgagtagctgggaccacgggcacgtgccaccacacccagctaatttttgtatgtttggtagagaaagggtttcaccacattgcccaggctggtcttgaacacctgagctcaagcaatccaacctccttggcctcccagtgttaaattacaggcgtaagccaccacacccggccaagttgaagtatattttgtgatttttctgacagtgcagactgaaaaaaatttaattaacctgacaagagtttactgaatatcacacaattgagtttttaatccattaatgttaaggcaggggtttactctaacacttttaaagtgtcagaagtagttgccaatgccaaatttttatcagcccccttgaatttatttgatttctgactttccacatttccatccagactttgacatgattgccgtctaataactgtagcattctcttattaaaacttctggctgggtgtggtggctcatgcctgtaaccccagcactttaggaggccaaggcaggtgaatcacctgaggtcaggacttagagaccagcctgaccaacatggtgaaaccccatctctactaaatacaaaaattagctgggcatggtggcaggcgcctgtaatcccagctactcaggaggctgaggcaggaggattgcttgaacccgggaggcggaagttgcagtgagccgagactgcgccattgcactccagcttgggtgacagagcaagactccgtctcaaaaaaaaaaaaaaaaacttctgaggtaggggctgtaccatatttttgccccacacccattaagcgaataccaaaaacaacttgtggaaatttgataattttatcaaatttattatttgggcaggattggcatttaccatgcttttccctattgctggcagtaaaacatgggtttaaggaagagtgtttttcagaatttacactgtatatctctgatttggaagttatataattggaatttatgattatgagattaaaataccaaaaagactaagtaacatatcagtgatgtcaatgaattgttttaaatggaagtgtgtgttcctctataataatttgacttttgatattttcattcctgtattgacctgaagctattaaaatggcggcaggtatctgtaatgacaggataaagaaaaaatatgggctttggaagatcatagactattgcctttgtagcataatgaaatctatacatttttatgagtgagtgtgtatgtacatgcataagataatatgtaaaggatacttttttttttttagcaattttctcttgcaatgagcattttgtggtatttttccattttataattccataaattacattttaatttcttattgaacatcagtattaccaaagcagtaaattatgtacattagaattttaaaaagtgctatatgataatcccttcaaaatatgattgttctatattgttatatggcacataagatcataattaatagattctggaagccaattttaaaaacaaaaaaattctctgaatatgtggataaatggatgagtgtgaacaattgtatctttgcaattaatgtctgctacacttcttttttttttttgagatggagtctttctctgttgcccaggctggagtgcagtggtgcaatcttgaatcactgcaacctccgcctcgcgaattcaaatgattatcctgcctcagcctcctgagtagctgggattacaggggcgtgccactatgtccaactcagttttttttttttttttttccccgagacggaatctcactctgttgccaggctggagtgcagtggcgcaatctcagctcactgcaacctctgcctcccaagttcaagcaattctcctgcctcagcctgctgagtagctgggactacaggtgtgcaccaccacgcccagctaatttttgtattttcagtagagacgggg[131 bp omitted]tttcaccatgttggccaggctggtctcgagctcctgacctcaagtgatctgcccgcctcggcctctcaaagtgctgggattacaggcatgatccactgtgcccggccttgcttgctacattttttaaagcattaatctgtaacacagagagaatcctggaaatgaaaacaaagtggtatacatatgttagggaggtatgtttaaaaaggttcactgaggaaaaagtgtgcataagagcagaatatagtgcaatccacttactggatgtggaaccagtaaggacaaagagtgggtttgaatgacattccatattccttggacatgatggtgatattttcagtgtagttgattaaagcatgggtccctaacccctaggccacagaccctgttaggaacagggccagacagcaagaggtgagcagtgggcaagtgagcaaagctgagttctgccttctgtcagatcagtggcatgaaccctattgtgaactacgcatgtgaaggatctaggttgcagccaggcgcagtggctcatgcctttaatctcagcactttgggaggctgaggtgggcggatcacctgaggtcacgagttggaaaccagcctggccaatatagtgaaaccccatctgtactaaaaatacaaaaattagccaggcatggtggcaggtgcctgtaatcccagctacttgggagactgaggcaggagaatcacttgaacgcaggagatagaagttgcagtgagccgaggttgcgccattgcactccagcctgggcaacaagagcgaaactctttttttttttttaaagaaaggatctaagttgctcgctccttgtgaaaataaaatgataaatgtaatgtgcttgaatcatccccaaaccatccccatccccccacctcaccttgtggaaaaatattgtcttctgcaaagctggtcccctgtgccaaaaaggttgtgaactgctggattaaagggctttactcaataaattatatctaactggggagacttttttccactattgattttcttcagtataccttcactggatgcttgctactcattaaggtccatgctacctcaatgtgcatggtatgctggggattgataataccaccttcacattcttgtaattcactaggaggactcaagacaccctatgttatcatagtcactatgatttattgtagtaaaagataccaagtcagttgagcaaagggaaaatgtgcatgggatgaagtccagaagaaatcaggtacaggcttccaataatccactccctgtagaatcattcatgatgtactgttttttcagcattgaaacatgtgaaatgtctacccagtaagctcaatggagacttagtgccctaggcactacgttgtgttttgttttggaactggtcacataggccagcttgggccaaaattctagattcccagaaggaattcagcataaatcacattatacaaatagccggggcatggtgagccactctcatcagagaattgtggaaatcctcctgaaattcaagttcccagataccagtcaagggctaaccttatatcttgcgctgctataacagaataccacagattaggtaatttataaacaatataaatttatctgtcatagtgcttgaggctgggaagtccaaggtcaagatgctggcaggtttaacatctggtgagggctgctgctgtctgcttccaatatggcatccagttgctgcatcctctggaggagacagatgctatgtcctcatatggtggaagtgatgaaaaagcaagaagggattaagttttaacaagggaacaccatcaaactatagcatgttgcaagcaggccttttaagtacaacagtctcaggcctatgttaactcttttctgaacaaagggcttcagaaatccagtacctatattcttttctttctttttctttctttgtatcaccagataccacattaggtcatcttccttcaaggtaatttgtaaccaaaaccagtagactaaaccaaataatttcttgcccctctgccccataactgataagactgtaggtacagtctacatctaccctcctcatgaccagagttttcaggttagtcacaagacagctgtagaagctgggagctatctggctttgtttttggttggttgttgtttgttcacagtcaagaggagagaactgtttcatttgtaatattgtatagttcatgtctcccaaaatgcatggctactctaactcccattcacacacaagattaattccttagctcttacctagtatgcccagcccttgtgggatcattcagttttttcatctgtgggcctaacttgcctgttcatctttggccgttgggatttccctgtcttagctttgagtttagctacattttaacgctttaggggatattgtcacataacatttttctatctttgaaaagatccacaatattatgtaatgattaccactatctaatcctagaactctttcatctgctcccaaaagaaatcccctacatgagctgggtgtggtggtgcatgcctgtagtctcaactacccagggggctgaggcgggaggatcacttgagcccaagaatttaaggctgcagtgtgctatgatcatgcctgtgaatagccactgtactccattctgggaaacataacaagacgctgtctctaaaaaagtaagaaaaaaaaaaccctacatattgacagtcactccccattcccaactacatctccccagccttggagacaactaatttactttctgtctctatggacttgcctattctgcacatttgatataaatggaatcataccatatatggtatcttgtgtctggcttctttcattggacataatgtcttcagagttcatctatgttataacatgaatcaatattttgttcattcacattactaaataatattgcattatatggctagaccacattttgtttatccactcatcagctgatggacattgggtcttctccactttttgactattatgactaatgctgctatgaacttttttagaacaagtttttgtgtggatatctttcagttctcctgggtatttacttaggagtgaaattgctggcacataagccccagatcgggtgccagcagattcagtgtctggtgaggtcccgctttctaagtcatacatggtccttctggctgtgtcctcacataactaaagaggcaaaggagctccctcaggccacttataagagagcattaatcctattcatgagggcattgccctcttgatctgatcacgtcccataggttccacctcctaatatcttcttgggagttaggatttaaacatacgaatttggtgggggccataaacactcagaccataataatacctaaagagaagtgagggattctgggaaatgaaaaccaggagctcaaggtagttggacacttccacatcagaaggcttggacattccggaagtgtagtccaggagggcggtactgttctgtttttcccccaactccagcattctgtgatatgtagtccggagttccgtgtagtcgcgcatagctcagctgcagtaaggctgtaaatgtttcccctgcggaatcctgggaactgtaggtccaatcgttctaggtagttgtaggcacttccggctcgaggaaggcagtgctgtggaattctgggaagcgtagtccaggtcctcctgatactcgcaggcacttccgcccaggaagacgacgtagcagccatcttttccctggctttggtgattcaggtcagcttctcaggaacctttcaaacttccccgaaatgcacttgtggtcagcagctagcggtcttttgtttggggaaaaaaaggagtagcggctaagagcggaggtttgaggggccaggatgctgttttgcgtttccctgggcggagcttgttagaattgggggcgtactggcttcgggcggctggggtgatgcttcgtcgggtttgaaggtctctcgggctgttcgctccctcattgtgactcccccacctaatgagccagccctaccacttcatacagtatcacattgagcgagttagttaatccccgtgccttcgtttgctgttctgaaggaaaataaaagcaaaaacttcctaatagaatgttttgagagaaaacgaggtaatacaaaaagtgtaaaactgcctggcacgtgaattaccaatactactgtaattttcctagaaactcccgttctgtggcgaaattctgtgagtccatgaagctggattgtccctgacctcttttgaggaaggagagggttgcttctaactggtcctgggagatgccactgtgatgtatccgggatgaagacacaatcctggttacttcatagcctgtttttcttccccagccctgacttctcaaaaagcactgcacagaggaggaggcagcagaaccccatgtgagtaagacttgttgttattcttgttttattcacataaatcagagaatgtgtggggtcatgtatttgggcatgagaagtgattataatttagcgttagttgctaagttccattctaaggggtttatacaaatgaacacctttccactatacagtggctctgtgaagtgatactctttttccgaggagactgagacataagaacataacttgtttgctcatagccacctagctagtaggaggcagagctagcattgaaaccgaggcagtctgagtctagacctgagtcttctttggtatgttctgcatgagccataggcagctggctagtatcatgtgaaaataggttgggacttcactgtggggactttgctcaaggtctgggctattctatgacttttaaaaaatagtggctgggcacagtggctgacgcctgtaatcccagcactttgggagtctgaggcgggcagatcacttgaggccaggagtttgagaccagtctggccaacatggcgaaaccccatctctactaaaaatacaaaaattagccaggcgtggtggccaacacctgtaatcccaggagtttgggaagctggggcaggagaatcgcttgaacccaggaggcgaggctgcagtaagctgagatcacaccggtgcactccagcctcggcaactgagcaagactctgtctcaaaaaaagaaaagagtttttaaaaatagttttctcaattattagttttatttgtttcaaataatatagaggtaacacataatcatggaaaacacagaaatacatttaaaaaatgtaaattccccatgaccttagggtataaagataacaactatagtttagtgcctttctgtcaagtttttcttgtatatatttctgtttattaggggctgttttgggagagggactgagtacagtgcaacactactcaaactgtggttcacaaagcagcaacattggcatcacccaggtagaaaggctcattcttgagccctaccgaaggccttctgatttagcatttttgcagataggacccagaaatctgcatttcaacaagatcccaaggtgagcgagatgcatgttaaagtttgagaagctcaggaaaaggtcttatctggaaactcaggactagaaaactgaccctgccagatgtcacagataaaactgagctggccatactagaaccctactcagtccagtgatttttctttcccactaaatattaactgtcaagtttctttgcaaaaaccatgacatgagtagaaggcagctgtcaagtctagagtcaaaatggagaaactcagagtcctgaagatctatttctcccaggctttggggagtagattccttcccatcttttgtactggaggccttctgcctgaagtgggaagatcagctacctatttattgttaattaacgttagatattattgccatagttgtcatcatctcgtcatcgttattattctgattaatgactttcctaatttctttaactttttttttttttttttttttgaggcagagtttcacttttgttgcccaggctggagtgcaatggcgtgatctcggctcactgcaacctccgcctcccaggttcaaaagattctcctgcctcaacctcccaaacatctgagattacaggcacccgccaccacaccggctaatttttttgtatttttagtagcgatggggttccaccatgtttgccaggctggtctcgaactcctgacctcaggtgatccacccacctcggcctcccaaagtgttgggattatgggcatgagccaccgtgcccagccaactttttttaaaaatataatttcaaacttgtagaaaagctgcaaaaatgataacgtaaggaaatctcatatactctacacccagattcaccagttgttacgtttgtttgttatgttatgttttccctgtgtgctctgttgatgaccatcagccatcaccaggaacatacctgtaaccaacaacaattgtttgttttagcttgctgcatccaaggagcccacacatgcatggggtgtcttggtaagaggcaattaggaggaccctggttatagggttttggtttatgttagatgagttggggagagttttaggcaatgggtttgttctggattggatgctgtgaagaagcagtagtaatttgatcagactattgtaatttttatgttggaggtggggaaataacaagactggagttgtcactgataacaaagtggtcatgttagatggaagaggcaattatttggctatttttatcaatgtaggatgtatttctctctgtgttacaagctgttttgtttttttctttttcaccatgatcactgagtagacctgtctcattcttgttgataaattggaaacaccaggttctggttgttgctgctgttgtcaaagtagttttttgttttgtttttttttttgtctttttgctttcacaactttgtcatacttatattttgtttttgtctttttgctgaagtatttgagagcaagctagagatagtgatgaaaatgaaattagttacattgataacttactgttatctaacccacagtttgtatttaaacttactccattttcccattaaagactttgaaagtaatttcttcccccagatgagtttccagtctaattgtatgcattgcacttagttttggtttcattagtcacctttagtctagaatgattcctcagactttatttcttttttgctctcgatatctttctagagtattgagaaattatttgtaaaatgttcttatttttttgtttccttaatatttattcatgattaaattcaagctatgcattgtcagcagagatgccataaaagtagggaggcatccttctcagtgcatcataggagtcaaatgttggtttgtgggtttgtcccactagtggtctcaactttgtttttttggataaaatgtctgccaggttacctttttccttttgcacttaatactttgagactatgtagccatcttattcctcaccaaactcaccagtttttagcagctattgatgatgttctagttatctttcattctacctttattagtttatgtgttctactataggagctttcttttgtcacccatttatttattac[138 bp omitted]cctccgcctcctgggttcaaacaattcttgtgcctcagcttcccaagtagctgggattacaggtgcctgccaccatgtccagctaatttttgtcttttagtaaagacagggtttcatcttgttggccaggcttgtcttcaactcctgactgtaagtgatctgcttgtcttggtttcccaaagtgctagtaggattacaggcatgagccactgtgcctggccaggttcctgcatttttaatttaagttaggtatggattgtcaaacggtgttttttaattgcggtatcttcggttttattagttcagtgttggcaaattattggaaagacgacaagatgtttttcagaagttataagacactttcacgtgacatagcaacaacctgtgaactccaactatcttataatattctgttggtggaaattatatttttaaggataatttcaaaccatagaccatcttctacttattgcagttgcaaataaataagatacctgactgtgttgtaagagctttctaccttccagcaatccgatgaggttggtactgttattctttaccacttgcagatgacagaagtaaggcaaagagatgttaatagtttccccaaggtgacgcttttagtgtcaggattttaacccatgcatatcaattccaggcctactgtacttatattgtctcaatttacgctgtactcaaaataagaattactggcgtgcaattacaggcacatgggcagtgaggccactgtgtggttagcctggttctgaactactgctgaaaggggtagttggatatctgggatccatgtcataatctgcttaaaagccacataaagctgcagccaccccaagaagcacacacctttgctaattcctaaagagcagccacgtgcattagcaacatacttacccagttttgatttatttctctcttctttcctagttcagcttcttaggactctgcacttccccagaaggaagaattaaaaatgaatatgttcaaggtgagtagagcttgcctttcccagctgttaaaaataccattttagtactcagagatggaaccaggtttttctttttcaagtaagagtcaaggcatctgatgacctgttgagtgtgctaggtgcttattttgttccgtttgagtttagctggttttggttttagttttatttcgtcatttttattttacaa[266 bp omitted]tggaaaccccatctctactaaaaatacaaaaaatgagccaggcgtggttgcaggcacctgtagtcccagctattcgggaggctgaggcaggagaatggcctgaacctgggaggcggagcttgcagtgagcagagatcgtaccactgcactccagccagggtgacagagcgagactccgtctcaaaaaaataaataaataaaaaataaaaaaattagccaggtatggcggtgcacacttgtaatcccagctactcagttggctgaggcaagagaatcacttaaatttggaaggcagaggttgcagtgagccaagatcgtgccactactccagcctgggcaatagagcaagactctgtctcaaaaaaaaaaaaaaaaattaatagaaatgaaaaaatcttatttccataatctcttcattgtatgtacttgtaattatatattggcattcataacatagatataattttacatttcttacatttataacatttatttttgttgtatttctatcaaatttatgtatccagtttttaaactattctctatatacagttagtgtaggatttttactgttttaggaactacagtgttagttttcttgcatttaactttttctgaaaaaatcaattttgaaaaatactgccttttaaaatccgtaacattaggtattcagaattgaaaaggtatgttttgtgtgtggtacttcagattttttttgatagaatattcaaatatggcacagtgtgtcaagatttaacagctgcttcacccagaaaaaatattagacttttttttactacaagagctagattctgtcttccccatgcctcagtcataccctgtgtgtttactggtctttttcccttttaatattttttttagttaaagtagtatgtgaccttaatttaaaatgcctagtggtaggaaaggatttgccaagcacttacactctgcccctgtattgagacctcacagcaactatgaagaggttctttgttttgtctccattttaaacataaatagaaaagggcttgtgaaaaatgaggaacgtgctcaagttcacatggaaaactaaagatccgggatcagtgtattatattcaagtgaaagaccaagacaggaggacagagagagtccttcattcagaaacctgacatgccctttaggtttgtttccacatataacgctgctcacttggctcccacctcagtaggaaggcaggtgctatcaaacactattgggactcaattggtaaacctttctggggaaattggcaatgttttaggttcagcaggtaacagttccaggaaattcccttataagagtactcactgagagcatccagtaaatatacaaagctttctttttcacagcagcacttttggtaagtcagtgtatggcattggcaagacaggagaagggctgggaaatctacaaacggctgggcatccagaacaactttccacctgttctcagtgttacccatcttctagtggacattggttgtaagattgaggtcatttgtttttgtcgtaggaagcagtgaccttcaaggacgtggctgtggccttcacggaggaggaattggggctgctgggccctgcccagaggaagctgtaccgagatgtgatggtggagaactttaggaacctgctgtcagtgggtgaggacagcctccctctggaatatctttgtgcccttggagttttaaggctttgtggcccttgaaattgttccctgagtgtgggaatctgactttcctaatttttgtgggatgcagagacactggatgtttctggtctttctgaacagaatattttaggtctttttcatttgtgttttatagaagaactgtaaatgaacagaatactgctatgccttgtctattctttttcatgttttacacctgtcccagtattgaattataaaaccaacttattgaatgtcatcagcagattttaatgaaataaaatagggtagaaaatactagaactccttaggaagaatggcacacactgcagcaaaaactctggccaattgcttgagtgatgtgagaaccaatgggagatttaaggaaaacagacattagttaaaaataggttattcaaacttggttttcataatatgtatttacgcatgtgtgtctgggtcatgaaataaatggtgtttctttactgaagtcacaatttaaataaaagtttgaaaaacactgctttcagtgtcttgaatgtgcagttgcaactcagatttccagtgtattttaactctaatatgttcattttcaacttgtgatttggcattttcacagggcatccacccttcaaacaagatgtatcacctatagaaagaaatgagcagctttggataatgacgacagcaacccgaagacagggaaatttaggtaaaaaccaaacagttatgagttcttatagttaactgtccatctgctttgcttcttcttagccttgttgccatcacctggtccaaattgccaactgtctttcctggattattgcaacaccctttgtactgcttgccctgctcccacccctctcctcttacattctgttctttaagtggcaaagtgagtttttgttaccttgtgtcagactatgttgttcttctgctcaaaattctctgtgacttattttacatagagtaaaatccacttaatgtggctgacagagtcttacacggtgtgcttttcatcccccactacctctctaaatatatcttctatactctctttctgtgaattccagccacattgtcctccctcttgcttttcagacctatcaaggatgcttctgcctcacaaccctgtgtgttcttccctctgcctgaaataatcttttacctataatccttctggtcccttcttcattcatttctttgctcagttttagtattataagaaaggcctcggccgggcacggtggcttgcgcctgtaatcccagcacttcgcgaggctgaggtgggcagatcaatcatgaggtcaggagatcgagaccaacctggctaacacggtgaaaccctgtctctactaaaaatacaaaaaatcagctgggcgtggtggtgggtgcctgtagtcccagctactcggcaggctgaggcagaatggtgtgaacccaggaggcagaggttgcagtgagctgagatcgtgccactgcactccagcctgggcgatagagcgagactgtctcaagaaaaaaaaaaagaaaggcctcctctgaccaccctattaaaaatacattctctccatttactctctgtgcactgccttatattgtgtgtaagcactgattatcacctcatatatgtttttgtttagtgacgtttgtctcctcactggagtgtaatctccaggagtggaggaatgttatctatttgcttctgtctcctcagtgcttagaatagtcctagtatatggcagagacactataaatattagttgaataaatgagttaatggaaatctgtcttccatggaggtaactaataggtggtgaacaaatcagcataaataagggatattgcaaaatattttttgtcttctaatgaattcctaacctaattctaatttctctttgtgtgtgtgtgtgtgtgtgtgtgtgtttgcatgtgtttgcctgtctgtacaagttgacccatatcttggggaacctatagtgtcatagttgtaaccaaactgaataacatgctttgtttatgactttctttgagcatttgtagcagagcatattcattcggggagggaatattttacaataaggacttttatttctatttcttaggtattcccccatagaagggaataaaattcgatttccttatccattatatcaggaaagaaaaagtaaaactaaaaaccaggacatgagcattagcctttccctcaaaatgtttgcacagttgcatcccatttgcttcttccaaagtccacattcataaaaagaaatggatcttacattgttgcctctcaaacatttatatcgtgtaggcttatatgtatgtctttagaaggccttttatgtaatgacaccattactgcttgtgattattctgatatgatactttatctgtttttttttcctaaatatcacaagctattaaatttatttcacaattgactagtagaccactttgtcaatttggaaaacattcttgttaaagacaaacatatctacatccagaaactttctataccttgctttcaaagagacagcattctttgctagccttccaattttgactcagtgcaaaagccttagaaggatccagtgcataggtcttcatgctttcctttcaccccaagtgattatcaactttgatttttctcttcagcaataactcacttggtgtacccctacctcaggtacagcttttcaactttgcagcaaaactgtactttctagttctttttgtatttcagataccttacttgtaaaagctcttttgctctatgacctggctcaaacttaaacttggatttgaagttagaagaaatgttggaagtcatttatatatgaagaaatgttggaaggactcatatatgcatacattccttgagtgactatgaatgactgccgggcagtaacttctgggctgtggttgtaaactgtgagcactacaaaatgtttttccttattgataccatattatggtaggaaagacatggaataaaaaatttagatagtatgtcagtagttgtgtttttaaatgggtttcattagtgcttagcaattgggagcttggtggaccatctcttggttttggaccatctcttggtttctgtcagtatgtaaaccagaaacttcaaatgtgtcacaaaagatgagcagaactatcccgaggttcattaaagtcttttactctgtcctcagtgtgaaatcttaaatctttgaacaaaaaaattcactatctctctgaatcctttgtccttacaggagagaaaaatcaaagtaagttaattactgttcaagacagagaatcagaagaagagctttcttgttggcaaatctggcaacaaattgcaaatgacttaaccaggtgtcaagactccatgatcaataattctcagtgtcacaaacaaggtgatttcccttaccaggtagggacagaactgtctattcaaatttctgaagatgagaactatatagtaaataaagcagatggtcccaataatactgggaatccagagtttcctatcttgagaacccaggattcttggaggaaaacattcctgactgagtcacagagattgaacagagatcagcaaatttccataaaaaataaattatgtcaatgtaagaagggtgttgatcccatcggttggatttcacatcatgatggtcatagagtacacaaaagtgaaaaatcttatagacccaatgattatgaaaaagacaacatgaagattttgacatttgatcacaatagcatgattcacacaggacagaaatcgtaccagtgtaatgagtgtaaaaaacccttcagtgatctctccagctttgatcttcatcagcagttacaatcaggagagaagtctcttacatgtgttgagcgtggaaaaggcttctgttacagcccagttcttcctgttcatcagaaagtacatgtgggagaaaaacttaagtgtgatgagtgtggtaaggaattcagtcagggcgctcatctacagacccatcagaaagtccacgtgatagagaaaccatacaaatgtaagcaatgtgggaaaggtttcagtcgtagatcagcacttaatgttcattgcaaggtccacacggcagagaaaccttataattgtgaggagtgtgggagggccttcagtcaggcctctcatcttcaggaccatcagagactccacactggggagaagccattcaaatgtgatgcatgtggtaagagcttcagtcggaattcacatcttcaatcccatcaaagagttcatacaggagagaaaccatacaaatgtgaggagtgtggtaagggcttcatttgtagctcaaatctttacattcatcagagagtccacacaggagaaaaaccctataaatgtgaggaatgtggtaaaggctttagtcggccttcaagtcttcaggcccatcagggagttcacactggagagaagtcatacatatgtactgtatgtgggaaaggctttactctgagttcaaatcttcaagcccatcagagagtccacactggagagaagccatacaaatgcaatgagtgtgggaagagcttcaggaggaattcccattatcaagttcatctagtggtccacacaggagagaaaccctataaatgtgagatatgtgggaagggcttcagtcaaagttcgtatcttcaaatccatcagaaggcccacagtatagagaaaccttttaagtgtgaggagtgtgggcagggtttcaatcagagctcacgacttcagattcaccagctgatccatacgggtgagaaaccatacaaatgtgaagagtgtggcaagggatttagtcgtagagcagatcttaaaattcactgtaggatccacacaggagagaaaccatataattgtgaggagtgtgggaaggtcttcaggcaggcctcaaatcttttggcccatcagagagtccacagtggagaaaaaccattcaaatgtgaagaatgtgggaagagtttcggtcggagtgcacatcttcaagcccatcaaaaagtccacactggagataagccatacaaatgtgatgagtgtgggaagggcttcaagtggagcttgaaccttgacatgcatcagagggtgcacacaggagaaaaaccatataaatgtggggagtgtggtaagtacttcagtcaggcctcaagtcttcaacttcatcagagtgtccacacaggagagaaaccatacaaatgtgatgtgtgtggtaaagtcttcagtcggtcttcacaactacagtctcatcagcgagttcacactggggagaaaccttataaatgtgagatatgtggtaagagcttcagttggcgatcaaatcttacagttcatcacagaatccatgttggtgataaatcctataaaagtaataggggtggtaagaacatcagagaatccacacaggaaaaaaaatctataaaatgattctttgtgaagactcgtgtcatttgaattcttccagttatcaagtctcaaagtcagtgtttcagccgtagctcctcatgtcccagtggtccaaagacaacaaaacaatctttatgattagcatagcaagggcttctttagtcagaaccttgacctttataaaatgttacttagaagaggggtgttaagagtgaaatttttctcaggccttttataaaagtatcatggtggacatgccaaaattaagtgtccactagaatgttaactccataaagacagaaactttgttcactactgaatctacataatcttaccattgccatatacttcacaggtgctcaatatttgttaataggtcctttttgaaaattatgttgagatcacctgcagaatatcatgaatttgtaaacaggaaacctgaaagtagccttaataagattaagtcgggagaccattgaaatgtagaaaaccactcaatactgaactccccaatgttaatttggcattgtcttgtgattagatcctgtcctcctttagcctcactaatcaagttgggtcctatcttcccagatgtctagttttctactggttttataccatatagattcaattatcttttgtaacagataattgtgttcatcttgtaataactggacactacatactacacttattttttcaacactgttaaggcaggggtttaagtgtcagagttgctaatgacacattttttagtagatgttgatcattggttttttcacattttcattcaggctttgacatgattgccttctaagggctttagcattactttaatcagagtttaggttgcggctattgcagatttcttttgtgaacttctctcccccatattctgagaaaaaggacaaaatattagttaaaatttgataaatttcatcaaaaatcgatttttggagcatgactttcaccctttttcctagtggtggcagtgaaaaaaatgcttttggaagagaagttagtatgtatcagaatatagaatgtgcatctcttttttctggaattcatagaataggaatttttgattaggagattcaagtagaaaatgtaagtagcacatcagtgttaatgaattttgtaaaaatagaaataattttttatatactacagtaaaaaggatccttgaaaatgatgaccaaattttatgacagaagagtgtaacagtttagtttaagaacatcacaggctgggtgtgatggcccacgtccataatccccgtactttgggaggccgaggtgggtggatcacctaaggtcaggagttcgagaccaacctggccaacatggtgaaaccctgtctctactaaaaatacaaaaggtagctgggcgtggtggtgcgtgcctgtaatcccagttacttggggtgttgaggcaggagaatcgcttgaacctgggaggcggaagttgcagtgagtcaagatgttgccactgcactctagcctgggcgatagagtgagactcagtcttaaaaaaaaatcacataccttaaattcgtgtgtgtccatgtgagtgaatagtgcatctaatcgtgagtctgtcctatgccaccacagcatcgaagagaatgcaggaatttttttcacatttaacttctatattttaattttttaactgagcatcggttttatagtaaaatactgttattttacagtaacatagtaaaaatataatttaaaaaattactagaatatattaatcccttacagttaagaaatcttgtgtcatcatatagcatataaggccaaaattaaagaatggaactctggaaatcaattataaaaacttgtatggtggttcaaagatacagatgcattggtaagagtgaatatatatttgcagtgaatgcatttgaagctgcttcttaggtacaaatctatgcaatcaatacagttttaatgtaattccagtagtaggaatgcttcttaattcttgacagacttactcactggctgaatggatagataacccagggcactggcttgtcttttcaagtgcttggtctgattgggggaaatggctgggcctttctaggtactgtatggcaaggaaaatcgagctgtggaaaaaaggaataataaaatttacagaggccaggtgcggttgctcgtgcctctaatcccagcactttggatggctgaggcaggtggatcacctgaggtcaggagtttgagcccaacctggccaacatggtgaaactccatcactattaaaaaaaaatacaaaaactagtcgggtgaggtgatgggcgcctgtaattccagctactcaggagtctgaggcagaagaatcatttgaacccaggaggtggaggt[137 bp omitted]ttttgaggtaaaatttaacaaagattccctgaggaaaagatgtgcgtagggagagaacagcatgatgccagtgaaaacaaactgggaacaggcagttaagcaggatcgaataccatttctttcttaggcgtttctgtgacatttaaagcttatttggttaaaggctttactcagcaaaggatatatctgtgaggtttccacaattttctctatttggattacaattcctgttgttcctggactgcatcttcacatgctaagtatgtaaagtccatgatacctcaagttgtgttagatatcagaaatcctgagtcttcgatgtttagtttgctcttagatatcaggatagcccaccaactctcagtagcttagtgagttaagtcaggggtcaaaaaactaccccctgtgggcccaatccagcccacttccttaaaggtttattagaatatagcaatgcctgtgttttagtgtattatctatgctttcttgctgcagtgtcaaaatttagtagttgtgacaaaaactatggaccacaaaatctaaaatatgtgctttctggccctttacagaaaaacgtgtactaagccttatgttaaaccaaatgatttgtctcccataacttaaaaaagaccccaggtagagcaggacttagacctgcttctgtcaggattccaaaatgattttttttgattctcatatctgcccttctggttaaccctggtctttaggttcaagatggggctagcaaccagggagcacctatcttttcttttcagtcagtggaagggaggtgctctttcatttgtagtgttaggtagtttactactcacagtgtttgtggctcctctggccttgattctcatctacactcaagattagacagctagttgtgtgtccagttcttttggcctttgtgaactatcaagtttcaactcagccaggtgcagtggctcacacctgtaatcccagccctttgggaggctgaggtgggaggatctcttgagctcaggggttcaagattagcctgggcaatatagtgagaccctgtctctccaaaaaaagttttaaaagttagctagccatggaggcacacatgtgtggttccaggtactcaggaagctgagatggagggatcacttgagcccaggaggttaaggctgcagtgagctgtggtcccaacactgaactgcagcctggtgacagagttgagacactgtctcaagaaaaaaataagtttcatctctcccttgcaccatggactcaacttccctattttgagcctccaggagatttttctatcttagcttttagcttggctgcatattaacatttgggagaatttgttatatattatcaggattcctttgtttttgagaaagagggatgcaaagccaaaatcagcggctgaatgacaacacatttaattcagaacttttagggtgtcttatgtcacaaggcatcaatgagaaggaatggaatcctgaaaaatttgggaacagatgagcagattccaacaaagctgagggttttgctcaatctagctgagcatctcttgccgttagaaggagcccttcttcctctatttgaagtcagtctcccttgcctgaaaagcctgtgatgaccttccctgagatggtttccttgcaaaaggctttagatcctcaagacttgcttccactacctctcatttttctagaccaataatgaaactcgggtcttcacagacaatgggaggagtcaccaagtagaaaatacgaccatgaggagatacatcgccaaagtaaggatttttgtaatttatatcaatagaaacctgagaaatagatatggttgtagatcttaccagtgttgaatcaggtggaaataatacaatgatggattaggctggatttgctgatatgggtgtagtgaacagtgattccagacccactgttagcttgagcacctgggaatagtttcaacagttttctcagttgtatgaaacttggatgcaaaaacgttagcctaccctaaagtaaaaaaaagccagaactttgtaagtatgttatagaatttctcgaccttggcacaactgacattttggactggatagctctgttaggggatgctctatgcattgtaggatgtttagcagcatccttggcctctagccactagatgccagtagcacacgtgatgcgcgcgcgcgcgtgcatacacacacacacacacaaacacacacacctcagttataacaagcaaaaatgtctccagacactgccagacagcagtgcgggggtttggaaattgtccccaactgagaaccagtgttatagaacatatacagagacataggaatgccagaatgctggagtggatgtatgtaaagccttactcaacccttgtactctgggaagattcggaagacactctttgccaaggacttgagaagttcattggcgagaggagcattggcagtttgggagagctctgtagtaactcttctcggcagaccaggaatgggagaggaaaattgtgacattgaaatgggctttaaaaaaaaattcaatgaggatgatgggatcctggagcattaggggtcaagtggaggcactttactggtagagacaaaatgagtgcgtttatcacaatgatcagcaaagtcaaagggattatcagagatctttgcatttgttcatagattgtggtgtccctctggctgaaatagaccagaagcctactgaatccctgcttgatttgaataagtggaaagactctgggtctggtaaatcaacatgagagagaattgtggcctctaaggcaattacataatgtgaatgagttctcattcccagaacaccttgaatgaagtgtaggtcaagtcttcttgagaaagtacactgatacgctgccgaaactgacttatactaccataaatcatcctgcacttctgcaaagtgacttggcaaccatatttaatggagctgtgattaggtaattggaaacagcctgaatatggagggattgattactggtcactagagctgaattgacattaactctgagaaccctaaaatgtcactgtagcccaccaggtagcagaagggcttatagaggatgaataattaatgaatgtttttgcttaggcccgtttgtggtggtctgaatggagccctgaactcatcctctgattatttcccaagtttcagaatgcagaattgcaccagctgcattcaatagctgacagaatcctcatactgaatgttccctgatccatggaaagagggctattttgccaaggacaaacactataaatgctttgtatgtgccaaaaaaaatgataacctgaaagcaaaaccacattcatggaggaattgcagaggttagtgccactagcagtatcttgaaagttgcaagggttatggttctatcacatcctgattcaaccctggtgatcaatagggtgacagatgttgcagccagatcaccttcatgttcatatgctgattgattcactcaattgacgtgtgcagagatacttatatcctagagaattacatgaaattatttgaaatttaattagaaattgacttcatttgcagttccagatgtggttttatttctacagcaaatcaacatgtctgctggcacctgatatagagagccaccaagccaatatgtgcctttttctctatacctgcctgtaaatgtcatccacagaagtttagtttggtagggccatcaatacacttttaaggtcccagctcagttctgtatctactttccagtatttttcacaatttacccagggattggtaaactatgtttcatggactaaatctcctgcaacttgtttttataaattgtctcattgaagcataaccataaccagtttttacatattacccaggagtgcttttatgctaaaatgacagtgttgagtagttaggccacagagatcatgtgatctgcaatgcctaaaatatttactgcccggctctttacagaaataactttctgacccctgctctactctgtagatacaatgctgattgtactttctaagcagaaagaagcaattacaatagacattttggttagaagatggataatacaaaaattcaggagc[133 bp omitted]aaccctgtctctactaaaaatacaaaaattagccgggtgtggtggcgggcgcctataatcccagctgttcaggaggctgaggcagagaactgcttgaatccgggaggcggtggaggttgcagtgagccgagattgcgccactgcactccagcttgggtgacagagcgagactccattaaaaaaaaaaaaagatttctaaaggaccagtggtatcggatattccaagatacctgttccaaagtgaagagcaaatagctgcatatgacccttctaaaaccaccagggaagagacacaatgactactaggattcttagtgagttttgtatgtgtgtgcttcactttaaacatttattatggtacaaaaacacataacactaaatttaccatcttaaccatattttatcttaacatttttaagtgtacaattcattagtgtaaattgtattcatattatgcaacagatctatagaacttttcatctcacagcactgaaaatctataccagttagatactatttcctcccccctcctcccagcccctggtaactacctttctaaattttgttcctataattttgactactttagatacttcatgagtagactcttacagtatttgcccttttgtgatttgcttatttcacttagcataatgttctcgaggttgattaatgtcgtgccatgtggcaggattttcttctttttaaaggctgcataatattgcattgtctgtgtacagcacattttctttatccattcttctgtcaatggacagttggattgcttctacatcttggctataatgctgtgatgaatatctattcctttgagatcctgctttgagttcttttggatatatacccggaagtgggattgctggattatccagtaattctatttttaattttttgaggagcctccatattattttccataatggctataccattttacatttccaccaacagtgcacaggtcttccaacgttacatccttgacaacacttgttatttttctcttcctttaccagtgaccacaatagtgggtgtgaggtgatatctcattacagttttgatttgcattttctaaaagattcatgatattgaacatcttttcatgtacttattgacaatttatgtatcttctctggacatgtgtgtttaagaactttgcccatttctttcattggattatttggggtttttttgttgttgttgttatagagttgtagaagtttcttatataatctggatattaaccctttatcagatatataacttgcaattttcctccattctgcaggctaccttttcactctgttgattgtttcttttgatgcacagaagtttttgagtttgatataatcccatttgtctatttttctttccattatctgtgcttttgttgtgatagccaagaaataattgccaaatctaatgttctgaaggttttcctttatattttcttctaggattttaacagttttaggtcttacatttaggcctttaatccatttttatttaatttttgtatacaatgtaaggtaagggtctaactttattcttttgcatatggatatccagttttcccattaccattttttgaagagactgtcctttcctcattgtgtaatcttggcactcttgtcaaaatcatttggttatatatgcaggggtttatttctgggttctgtgttatattggttatatgtctatatgccagtaccacgtcatgttaattactgctgcttttgaagtatgttttgaaattagggagtgtgaggcatctgagattgcatacaaattttagaatttttttttcctatttctgaaaaaaagtcattgggattttgatagtgattgcattgaatctgtaaatcactttgtgtagcatggaaattttaacattattaagtcttcaaacccctgagtacaggatgagttcccatttatttgtatcttcttagatttcttcttttattaataacaatgttttgtagttttcaatgtaaaaatatttcagttatttgattaagttctttcctcagtattttaccctttttgatgctatagtaaatgaaattttcttttcacgttggtgattgctagtatatagagatgcaactgattttttagtgctaactttgtatcttgcaactttgctgagttattagttgtagcttttttgtgtacgtgggatctttctacatataagaccaagtcatctgcaaatggagaaaattttaattcttctttccaatttggatgtctttttaaaaactttctgattgacctggctagaatatccagtactatgtcaaatagtagtggtaagttgggcatccttgccttgttcctgatcttagagtaaaagctttcagtatttctccattgaatatgatattaactgtgggcttttcatatatggctgtcattatatttaggtactttcctttcatttctagttaagtggttttttttttttaatcatgaaaggccctttattttgttatgtggtgtattacattgattgatttttatatgttgaattataccaggtataaatcttgcctgatcatgacctgtgattcttttagtgtgctgttaaatttagtttgctagtgttttgtttaggatttttgcatcaatatttatcagagatattggtctacagtttattttcttgtgtgtctttgcttttggtatcaggttaatgatgacttatagaatgagtttgagagtgttccttcctcttcacttctttggaagaatttaagaagaatttgtatgttaattcttctttaaatatttggtagaattctgcagtgaatccatcaggtcctagagttttctttcttaggaggcttttgatgactacgtccaatgcctcactagttatacacctgttcagttgttttcttaaaatttcttcatgattaagtcttgataggttgcatattcctagtttatccatttcttctaggttatccaatctgttggtgtattcttcttcatagtaatctcttatactttttttatttctgtgacatcagtcataatgtctcctctttcatttctaattttaaatatttgagtcttctctttttcttaatctagctaagaaattaattttaattatttttactaattaatttgtcaattgtgttaatcttttcaaaacagactcttaattttctttttaaaagttattttcttctctctattttctactctaatctttactattttattccttccgctgacttttggtttgcttgttcttcttttcctatttccttaaagtataagcttaggttgttgatttgagatatttcttgtttttaaaggtaagtgtttaccaatataaatgtccctatttggattgctttcactgcatctcataagttttgaaatgttgtatctctgtttttatttgtctcctgatgttttctaaattcctttatgatttattttttggcccattggttgtttaagcatgcattgtttaatttccacatatttgtggaatttcttgttttccttctactattaatttgtagttttattccagtatagttagagaagatactttgtataatttcagtcttcctaaatttattaagacttgtaatatagcctaacatggtctatcttggagaatgtttcatgcacacttgagaagaatgtgcattttactgtcgttaggtgaagtgttctgtatgtatctgttagatccagttggtctttagtgttgttcaagtcctccgtttcctcattgatcttctgtctagttctatccataattgaaagtgggatattaaagtatcctactattattgtgttgctgtttattccccattcagttctgtcaatgtttgttttatatatttgggcactctaatgttaggtgcatatatatttacgtagccctctgtatctgcaggttctgcatccacagattcaactaatcttggatcaaaaatatttgaaaagaatgaaccgttgcatttgtactgaatatgtaccaacttttttgggtgattattccctaaacaatacaatataatgactatttgcatggtattgacataatattaggaattataaatagcccagagatgatttaaagtatatgagaggatgtgcataggttatatgcaaatattgtgccattttatgtaagggacttgagtatccatggattttggtatccacagagtgtcctggaactaatcccctgtgaatactgaggaacaactgtcattgttgtatcttcctagtgagttgaacttttaatcattatatgatatccttctttgtctcttgtgacagtttttgtcttaagtctattttgtctgatataaatgtcaatctaaatagaagagacagagtctctctaaaataaaattacatttattcaggaatgagcatttcaatgggaatacagtgggtatattcagggaggtaaatgaagacaagagttttataaggaaaaatgaaaagggccacataagttgttttgaaacaatttttcttgaccacagggttcagtaacaacggtggtatcagtccaaggttggacagccagttgctgggtagatgtcttcatggaagtagttttgtttgtgtaaggtcatgacatttgagcaacaatggaggtttggagggagtggctcttaggctaggtctacctggagtccgttgttaagttcaattttgtttgttctgtaggtgtgggctattatttcaaagctgtaggccagcattattgtgttaggagttgtacttccacagaaatttgacaggcaacaggtacaaagtttaaaaagaaagatacgaagtaaaatttatactaatatgatcatcccagtttgcataatggtttcgagccatgaacctgggcttaaaggcaagcaactgaatcaatcaaatgatcattgggaattaggtgagacctaatgtaactatgtgcgtgttttcttattttgtgtatttgggtctcaacttccccagaggaatttatccaggtatgcatgtagtcctagcaatagcatagacactaccttatttaaccagtagataatatagaaaaattttgtcatctgatatctcatgactgggttgaattaaaagcatagagtgagtgacagttgtattaggaatatttttaaagttggactaaaggattctttggtcatgtaaagatctacagttggcataacagatctaacattttgtcaagttgtccacataagctactaattgtaaaattttaactacaccattatcctgcccagtgaaaaagttaagcataggcaaggacaaactaagaggggcaacagtctcattatgataaagattgttctggcatcttgagaaagctgtccacagcataaagacatcaacttctcatcctggtttgtagtttgaatgtctctcgttatagcatcgggtggtttggtgaactttctgcatgacccacaaatcaggcatgaggcttgtctcttaaaatttacatcaagttttctagcttcagcttacagggctttaggaaagagtagttcccattcttagtaataacatgggagaaaattagattagggaacctagaataacttaggatccagtctggtctacagtagataataaaaactcaaagacaatgcacagaactacaatctaataacagatgtattatagtccttttctagaaacataattttgtctctatatagttatcctaatttctaccaaagataattacagtaagactgatttgtttgtaaataagtttagttttattattattttaggttcttgtattattttattagttttattattttagttttttaaagtttatttattacttaataatttacataagagcagcaagagtagtaaattgagcacaaaagaatctcagattttattttattttatttttttgaggcggagtctcgctgtgtcgcccaggctggagtacagtggcgcgatctcggctcactgcaagctccgcctcccgggttcctgccattctcctacctcagcctcccgagtagctgggactacaggcgcccgccaccacgcctggctaattttctttgtatttttagtagagatggg[135 bp omitted]tctagaaagccaaacaaaggcagacttcagactttgtttgcagtaccaataaaaatttaaatatggcattccagttttaattggtaatacaaccaatgtttttaactgtatcatgttacaaggaggtacagattcatactgaatgtatgcaaataattatattgtcatttaagaaacactagcaaatcacttccaaattttgaagggatcaaatagaaaaaaataaatatttccacctttgttcacagaagtatattttaccaaattgttgtaaactatagatagcttaagagaaaatgtttccttaaacttggaagacaaaacatttcagtaaaaaaccaacaatgtttaaattaaaagttataaaaacattatcagttattcaatttcatgtaattagtttttgttatgcttgatcttgattagcagtttcacaaattcatcagtttcttcactgcagttgtgaaaagttttatttagttcattaatcttgaagttattagaaacttgtatttaagagtacttattagagtcttttccatgaatctgattgcagatacctttagagaaaaatcaaaactatggatgtcaaagacttagaataaccatcattaaaaatctgatgggagttcagcagttgagaaggaaattcaattatttctattgtatttagcattttaaggtaacaaccagaatcgtggttgatagcattacatcaggaccatcagacctttttaaatttcacataatatttaatatacatcaataacatatccatgtaacttaaagaaaatatagcatcactttattatttgacattgattcccatacaattaatcaaataagccaaattagtttaacatctctacaagatgatacctcctttaaggttctccaggggcccaactggaaaatctctcagttaattataggtcaaaaagacttaatttagaactttgatcctggagagacctgccaaaaatgtcaaaatggttaaaacatttaattaaaacagaatcacagattattgtggaataatagtcattcacttaatcagagtgaaaagagattccaaaagcaaatacagaacattacatggattaaaaaaaaaaaccttaattctttcaaagctcctaagtaatgaaaaacctaataaagacaacatgaagcatgagaaattattttgataaaacaaaaaatctttgtttcctaggccagctatcaaaagataaaaaccttctacatatttaaaaaccccttgtgattgcttctccctatgggaaacccatttcaataacctggaagttgagcctgatgaaaaggtacttgaattcaactaaacactggaagagtgtgtatccaaggttatgagtgtaccatattatagaaaagataaacaagaaaacaagtaccttgagcaggcggatatgtggctcttagaaaaagtaaaagaatgtggaatttattggttaaacagcaattcagacacatcaagaaaagacaaaattacagaatcaaattatactggaagaaaatattattcccctagattctcctaggccttaaagacaaacatttttagtgttaggccacaatagcagagtcagaactggagagagagccagagagagagcgagcgagagagcgagagaagcaagaggagtgagaggtgagagagggagagagttacaggagctgactccaaagttgagggagagggttatcatccctaaggagacaaggaagagctgaaggcaatgatgcatgattttagtcgttcacttaatcagagtgaaaaaagcttccaaaaacaaatgcagaactttacgtagatgtaaaaaaaacaaaccttaattctttcaaagcacctaagtaatcaaaaacctaattaaagacaacatgaagcatgtttctcatcaaatcatgtgcaatgagatacagcaaagtggaactgagatatgaatttgaaaagcttcaaaaggaaagttcttttgagaaactaaattactatttttaaatgagggagatagtattttaaagctggaataagggaaattaagtggaaagtgtaaaacaggaaaaagctgcagttcagaagacggctgaaaatttaaacggatttcagaatatcaaaacctcttgcagattttttttaactaaaatcacataaatacatcaagaaaaccttgttgctttaaacataggtgaatggattctggttttgtatcactgtattaatactcaatttttgataaaacctgtgaataattcccttttaactataggcaacttgattaaacacaaattttttccataagattcatcttatataaaaagaaaattgtctgacaaatatatccaggcaaaatgtatgcttgcaattctgaagacctcactattttaacaacaattttaaaatcagtttatttaccaaagatttacctaagtcacacaaatttttaaaagttgggtttattactatttttagtaaatagttatttactattttttctgataaattgcttaattttttttctttacatcagtttcataaagttcttttatatatttctgtagaagaatattatgtatgtataacacagaccaagaaacatacagaaacacaaaaagatcttatagcttatcactgtaaaattgtagtcaagaaactgtaaaatatactaatataaaatcacaagtgtataaaaaaagacagttggatccaaattatatttctgaaaaaatgggacaagttaagatcagtttttcatattgctaatcttttttttttcttttgcctttgataggtaatcttatgagggaagtggaccaaattttgggtaaagctgtttttatagcattttagtttttgaaaaatcttttacccttttttcctcttcaattttaaatgagttgttttaattaacttctggatatttacatttcagttaggattggctagaaaaataaacttccaagaatccttgaacttattaacaaatttaatacaagcaaacaagttagcagattcagagcgagcagagaaaaaaagagagctagcttagaagcccgtacatgttaatcctacagttccagtctcttaattcagctctaaggaaacaagcttagagagtttaaataattcccataatggccgtacattatccttagtgtaatttgccaattattttttaaatgtgcatgagaaaggaccataaatttcaaatgtatagctgcctcaagtgccagagggcttggcattctttagaagttgaagatcccattgcatttcttatcaatctctcaagagcaaagaaaagcccaaaaattttgtcaaaagcattgaccaagctgttttgttttaactagtgtacctgacacagaattcatctttttatacttggcagatggcctttgtcctagttgtctaacctatgaccaagttttccctggttgtgtagaaattttcttgagactggcaggtgcctcagtggtaatcttccttgtctgtgactattttatccttacatgggagacgttttctttggagactggagtccgtcatagatggcagtgacgttcctagtggcatttattattattcttattttgttgttactgttgttgtttagatacaaggtctcactctgttgcccaggctggagtgcagtggtacaatcacagctcactacagcgttgaactcctgggcaaagtgatcctgttatcgcagcctcctgagtagctggggagacacgcgtgcatcaccacatctggctaatttctaaagaaatatttttagagacagggtcttgttatgttgcccaggctggtttggaagtcctggtttcatgtatttctctcatctcagcctcccagctggctgggattacaggcacaagccaccatgcctggtcctagtggctttaattgtccactaaaatcagtttatttaccaaagatttacctaagtcatgtgaactttaaaaaaatgtgagttaactactatttttctgataaattacttaagtgcttaatttttttctttaagtcagttaaatagagctctttcatacattttggtagaaaatattacatacatatatagacacaagaacatacagacaacacaaaaagatattttcccttttccctttaaaattttagtcatgatacattaaaacagtaatatactgtgccatttagaatgtttatttttgctctttgaaagtgttcagaaacaagcagggaaaacaaaagagccaaattatttacagttgcatgtaaccaaattgacatgaaaccaaatgaagcgtgctcacaaaaattttaagccaggcttgcagagcaaacaaaatataaaaccgtgtttgcagaaaaaccaaagcaaattcagtagaaaatacatgcctcacagaacgtaagttctgtgggaaccagagtactctccaaaagaacacttggccttataccagaagaggctttccagaaaagacaaaaagtcttttgtagtcccacaagggttgcaaggtccttaatttaaggtggccttatagccaaatccagatcctgaataaagtcaaaagaacttaccaaacgaaggacgtctgagaatctaagcagagattcaccagagcagagaaggaaggccatagaagcagaggccacaaaaggggtcaatgttggtacctcactagattccaggggatgctggcctgtttgaggtcagctgacttcttgacacaaactttatgtcaacctaaatagcagacacagagagaagatgtctaaaagaaaattgtatttattcaggaatgagtattgcaatgggaatatagtgggtgtattcagggaggtaaagaaagacaagggcttttaaagaagtgaggagggttacatgagttttttgaaacaattatctttggctacaaggatcactaacaaaggtggtagtagttcaaggttggacagccagttgctgggcagctgtcttaaccaaagtatttttgtatgtgtaaggttgtggtggcctttgtgcaaggttgttgtgatttttgcagtctttgtgatcgttcctcttatcaggtatatgtgcatgagaaccttcttttcatcaccttccctggctccatttgtcctgctacggtgacaccagtcttttagtccatacatttgacttcatgaggagtttgctataatcaattgaatgaagaagaaacatgtggacctgctttataggtaattctgcataatgttctagcatcacctaaaaccggacagctggcacactacagcctcaggctgtggtggccccaaaggagagtggtaaaagaaaatattcccatttgttagaattttgagtagtgtacttcatagtttttttttttcccagaaggaatgatgccagggggatgaatagttttgctggatggtcatggacttcaaagaagcatgattgataattggttgacaaggcaaattgacaatgaggtatgtgagtggactacttttaatgagcagaatataaaattacttgcggcctatttaattgtcaataatcagcaacctcaccagaagatgagcttaataatcaggtgatcaagatggtacattctgtgaatattcttcaagatttttctctagtcaaccatgtccattcccagtgggtgcatgaacagtgtagtcatggtggaagaaatggagcttattagttcagtactatgaaattccatttactaaatccaatctggctacaaccacatttatatggccaagctatcaaaagtatggactaacactggacctcagataggcactgttcttcaaaggggactaccaacctcctgctggaatttgattacaccggaccactttgatcatggaggagacagcactttgttttcagtggaaaagacaattactctagatatgaatttgcctttcctattccaatgtttctgataaaagcatcacatgtggactttacaaaatgttttattttctgccatggaattccacccagcatttcttgtgaccagggcagtcatttttcaaaaaatgaattgtatccattgggctcatgttgatagaattcactaaacttaccatgattcctgttaacagttccatttcagtagtgggacatgcctcaattctcagaagtcctaccatctctgatttgtcttcccatgtttgtttacctaattcctactttaaaatgtccttgtccctaaaatcctagtgattctgcttctctgattgaaccctgactgatattgaaccatttctgctccttttcagacactacccctctctctcaactataatcactttcctaacttctatcaccattgactacttttccttttatctttatatatatgaaaccatattgtatatatccttttgtgtctctgttttgcccaacattatgtttgtgagattgaactatgctgctgttttatagcaattgtttacttattttgttactgtagagcaagtgtaggcacactacatcccatgggtgaaatcttgtatatatttcggggtgcacatgtgtgtgtgtttctgcttgctagaagtggaatttctgtgtcatggagaatacataaatttaactctagcagatactgtgaaacattttccaaagtgattgtaccaatttacactcttacaaggaccgtggtagagttccatctgctccacgtgcttgccaatgtttggtgttgtcagacttaaattatttttaaattattttttaaattcaccattctaattttttaaaagaagtagagtataatgctggttaccaggggctggagtggaggggttgggacatattggtcaaaagatataacatgtcagttatacacgagtaatttttaaaaaatcagtgattctggtatggcaatagagttgtctcattgagggtttaatttatactgctgtaatgactaatgaagttgagcaaacagagcatgtatctgaagccttgtacatttgtatattcttcatatagtgcttactcaagtgatttgttgatttgtctatttggttgtcagtcttattcttgtatttataggatttctttatattctgcttacaagccttttgacatatgtgtgtattgtgattatcttttcaactgtggccagcattttcactttccttatggtacatttgataaacaaccattctcattttaagttttttaattttacttttcagttggtactttaaaaaatcgttgccaacattagagaaggtcacaaagatattttagtagctatttaaaaaaatcttttaattttaagatctatattccatatcatattgatatttacatatgggatgtgctaaaggtcaagattaattatttttctatgtgaagaatatacaatatcctcacttcttaagagatttctccattttattatctttgtcaaatatcaaatgactagatatatgtaaatctgtttctgaactttctattatcttccattagtctattcatatttgcatatatagcacacttttaattactgcaaatacataaaatgtcttgatgtcttatcgcataaacccacctctttctattttcttttgatgttttggttattcttgactgttgcttttgtttacagattttagactcagcttgccagttttcaccaaaaaactgctgagaattttattaaatatatagattattcaaaggagcactgatagctttacaacattgaattgtccagtatctgaatagcaccacatattttaaattttcattgaagtataaatatatgtagaaaaatgtatatgtcatatgtgtcatgattgtttaattttcaacacactcaaaataccagcatctgtatcaagaaactgcacataaccagcatgtggtagccatgaaaatgtatttcacaaatattttaatgcaagtaaccaaagacccctattgttgtgttttaaggtcaatcctgtgtttgcatcaaggccagattttctgaaggctgctgctcccagtcaatatctgagagcagtaaggattctaaggtagacctgttcagggagacatggatcttctctgttggatagataagattgtgaatacctgactttaatggctttttctttaatataacttttctttcttttttttgaaatttagtctcgctctgttatacaggctggagtgcagtggtgcgatctcggctcactgcaacctccacctccagggttcaaaggattctcctgcctcagtctcccaaatagctgggattacagacatgccaccacacccagctaatctttgtatttttagtagagacggtgtttcaccatgttggccaggtgggtcttgaactcctgacctcaggtgatccgcccgccttggcttcccaaagtgctgggttacaggtgtaagccactgcacctggcctaatgtaacttttcttaagctgtatggaagtctagaatgattttatcaaatcttcctttgttgttgtgttgttgttgctgttgttgttgttgagacagggtctcactctgtcacccaggctgaagtgcagtggcacaatcttggctcactgcaacctctgcctccccggctcaagtgatcctccagcctctgcctcccaagtagcagggactacaggcacgtgccaccacacccagttagtttttgtatttttttgtagagacagagtctcactttgttccctgggctgccttttgttctttactcagtgttagatttacatcatggtgcagcttctctcctgttttctctcacaatcatttcccctaataaaattcttacacaactaattctgcctttgcattttttttctttctttcctttttatttttcttatttatttatttttttgagacagagtctcactcttgttgcccaggctggagtgcactggcgagatcttggctcactgcaaactccgtctcctgtgttcaagtgattctcctgcctctgcctcctgagtatctgggattacaggcatgggccaccatgcccggctaattttgtattttttgtagagatgggtttctccatgttggtcaggctggtttcgaaccccgaactcaggtgatcctgcccaccttggcctcccaaagtgctcggattacaggcatgagccacttcgcctggctgcatttttatttctaagaggacctgcattagcacatcaccctaaaaacgttcgtgcccaattcaaattcctacttttctctcaaggtaggcactgttctgatttataatagcatagatttgctttgctattttttatacttcatataaatagaaaaaatatgtacaattttgtgttttatttgtccacattatgtccgtgacatttatccatgctgttggaagtgaatataactggtttactctcattaatatgtattattttaatgtataaatatcacataacttattaattcatttaatcgttgattttgtgtagtttcttgtccttggttattaaaatcagtgcttgtaggctgggtgtggtggctcacacctgtaattccagagctttgggaggctgagatgggcggatcacaagttcaggagttctggatcatcctggccaacatggtgaaaccctgtctctactaaaaatacaaaaattagcttgacttggtggcatgtgcctataatcccagctactcaggaggctgaggcaggagaattgcttgaacccgggagacagaagttgcagggagctgagattgcagcactgcactctagcctgggtgacagggcaaggtttcatctcaaaaaaaaaacataaataaaaaatgaataaaataaaattagtgtttgtataaacataaaaagacatgtcttttgctgaacatatgaatctccttctattgataatatatatataagcatggatctaagggttatacgacagttttagtaatagcactgaaagttttagtggtagcactaaaactactcagcttcagtaattactgcaaaactttattgcaaagtggttgtataaaactacattcctacacgatgcaagtatttgcatttttgtcaacctttctttgactaattcttaattttaacctttatggttggaatgtagtggagttctcataatattttgagtttctttgatgactcaagaacttgagtatctttttatttgattattgagtatttatgtcatcttttctgaactatctgttcagttatttttacatttttctgatttgtttgcctgacttttcttacagattttaggatttacgtattcttatatgctcaggatatgaatcttttgtcacatatatggtttacaaattttctcaatttgagaattaccttttcattttctcattggtgccttaattaagagaagttcttcatttttaaaataatctaagtcacctaattttttaaaaattgtggattattttggtctcatataatatttttttccacttcagggcaacaaacaggttcttttgtttccctaagtgtcattgctttactttccaaaattagatctgcattttttctgaaagttatatttgtgaattctgtgaagtacagacgaatatatattttcccatgtggatatctaattgatgaagaagcacatattaaaaagaatttttataatctgtacagtagcatattcttttcacaaatgaaatgacagtatttactttgatctacactctattctcttcctttatctatatatctttaagcaaatgccacactgatattgtagctttataatatgattagatatctcataaagtaagtcttccattttgttattctttcacattatcttgactattcttagctctcagattttactccaaatttttataatatttgtatcaatttccagaaaaaattctagtatttttattgggtttgcattgatatgatggattactttggtgaagaatattgagatgtttaaaatattaaattgtctatccataaatattatttattataattattttaaaggttttttgtatatgcaggaaaataaaagcagatctttacctaataatatttacatagatttcaaaaggattaaagggcctaaatgggaaaggtaaatgtagaaagttaatttttttaatgtaggagaatattcttgaaacctaggactttcaaaagcacagaaattaaggaaaatgcttattaaatttctctcctcaaaattaaggatgcttattcaatgtgagacacagtatatgaatattaaaatcaagtacaggtgccaagacaattcaatgaaaaaagaacagtctgttcaacaaatagcaaatagtgctaagaaaactggatgtgcacatgaaaaagaatgaagttggaccccctactttacatcatatacaaaaattaacttatagtgggtaaaaggcctaaatgtaacagctaaaactataaacaactagatgaaatcatagatataaatcttcatgaccttgaaataggcaatggtttcttagatatgacatcaaaagcacaaggaacaacaaaaaataaatgaatgaattggaactcatcaaaatgaaaaacttttgtgtatcagtggataccatcgagaaagtgaagacaccaacatgggtgaacgtatttgtaaatcatatatctgatgagacttgtagctagaatacataaataactcttacaattcaacactttagaaagacaaataacccaattaaacaatgggccaaagtatctgaatagacatttttcaaaagaagacatataaatgcccaataggcacatgaaaagatggtcaatgtcataagtcattagggaaacggaaatcaaaacaacaatgagatattgcttagccaccagattggctacagtaaaaaagacagataataaaagggttgccaagggagtggagaaattggaaccctcatacattgttggtgggaatgtaaaatggtgcaatttatttggcaaacagtctggcagtttcccaagggtttaaacatagagttattatatgactcagcattccactcctagatatacaaccaagagaaattaaaacttatgcctacacataagcttgtacataaatgttcaaaacaacattattaataatagccaaaagtagaaacaatccaaaatagccattaatgaataaataagatgtgatgtattcatccaatggcacattatgtagccatgaaaagaaatgaataactggttcatgcaccaacatggatgacccttcaacatgttatgctaagtaaagttcgtttcaaaagaccacgtattgtgtgagtacactgacagaaaatgttcaaaatatgtacatctacagaaagtagattagtgattgcctagggctgaggagtttgggaaaaattggaagtgactgttaatgggtatcaggtatctttttgagattatgtaaatgtcctaaaaattgattgcagtgatagttgcacaactctctggatataataaaattcatttaactgtgctctttaaatgggtaaactgtatccattatatctcaataaagtttctataagaaatatcaaaaaatagctctccctctccctctccctctccctctctccctctcttccctccccctctcccccctccctctcccctccccctctccccctctccctctcccctttgcacggtctccctcccatgccgagctgatacgaggctggactgtactgccgccatctctgctcactgcaacttccctgcctgattctcctgcctcagcctgccgagtgcctgggattgcaggcgtgcgccgccacgcctgactggtttttgtattttttggtggagacggggtttccccctgttggcccccctggtctccagctcctgaccacgagtgatctgccagcctcggcctcccgaggtgctgggattgcagacggagtctcgctcactcagtgctcaatgttgcccaggctggagtgcagtggcgtgatcttggctcgctacaacctccacctcccagccacctgccttggcctcccaaagtgccgagattgcagcctctgcctggccgccaccccatctaggaagtgaggagcgtctctgcctggccgcccattgtctgggatgtgaggagcctctctgcccggctgcccagtctaggaagtgaggagcgcctcttccctgccgtcatcccgtctaggaagtgaggagtgtctctgccgggccgcccatcatctggggtgtggggagcgcctctgccccgccgccccgtctgggatgtgaggagcgcctctgcccggctgcgaccccgtctgggaactgaggagtgtctctgccccgctgccaccctgtctgggaggtgaggagcgtctctgacccgccatcccgtctgagaagtgaggagcccctccgcccggcagccgccccatctgggaagtgaggagcctctccgcccggcagccgccctgtctgggaagtgaggagcatctccgcccggcagccaccccgtccgggaggtggggggcagcccccgcccggccagccaccctgtccgggaggtggggggggcgcctctgccccgccgccccgtctgggaagtgaggagcccctctgcccggccgccaccccgtctgggaggtgtacccaacagctcattgagaacgggccatgatgacgatggcggttttgttgaatagaaaggggggaagtgtggggaaaagaaagagagatcgggttgttactgtgtctgtgtggaaagaagtagacataggagactccattttgttctgtactaagaaaaattcttctgccttgggatgctgttaatctataaccttgcccccaaccccctgctctctgaaacatgtgctgtgtccactaagggttaaatggattaagggcagtgcaagatgtgctttgtgaaacagatgcttgaaggcagcatgctcgttaagagtcatcaccactccctaatctcaagtacccagggacacaaacactgcggaaggcggcagggccctctgcctaggaaaaccagagacctttgttcacatgtttatctgctgaccttccctccactattgtcctatgaccctgccaaatccccctctcggagaaacacccaagaatgatcaataaatactaaaaaaaaataaaaataaaaataaataaattaaaaaaatttaataaaaaacaatcaatacatcaaaaaaagaaatatcaaaaaataccaaatagtaggtattgctgtgtctcaaatgcataaggtattaatattcgtggtatataatccaagtgaacaaggaaaatatagcacccataacagaagaaaagggcataaatatacagtttacagaataggctgtaaagtattttgaagaaatgctcaaacttattaaaaatcagagaaatttgattaaaacagtgaaataccagtatgtgtttaatggagtggcaagacataggatgatggttcatggcaaatgatggtatggaaatgggtggttatacaacaaactgtattcagtgctcatgagaatgtggaatggtttaaccattcaggagagcaatatagctattaatattatttgtaaatgtgtaagtatatgactctgctatgaaccaacaactacacttatggatatgtgtcctaaataaattgtcacacatttctatgaagatgtatagtgatgttcctagcattgttattgccaatggcaatccaggtttctgtcatggaatagtaaaatattttgggtgtaaacaattagttctataaaataggttaatgtatgctagaaacatggatgaatctttaaaacatactgctgagttttgaaagtcttaacatttatttttatgacataataccacttatataaactaaaagtgtgcacacacaaccacatcacatgcactttgcacaaaacacacacaaagagaaacacaacaaacaaaatatggggctgggggaggaaatgaaagtgttccatagggaaaagaaaggaataaataaataataaaattattttgaccaagttgctagatataagcttcagtacaatttgattagaagtggtgatattcagcattttcttcccattctcattctcagagataaattttcaacattttgttaattgttgtgtatgttcattttagttttaagtgggaatttatatttcttaaatgtatcatcataatgttcctcataatattctcaatatatttagtgatgttcccttttacttctgaaactggtaatatgtcatttctgtcttttttgtttactgtcactggactttgtcagttttattgttctatttatagaatgatcattttactttttaagatccactccatttcgttttctatttcatgtatttcctattatcttgatcatttctttccatctacccactgtggttttggtatttgtttattgaattcctgagataaatgtttttatttttttgttcagcttttctcctgttttaggacagatgctcctcaacttacagtgggctcacattctgatgaacttacctaccgtaagttgaaagtatcctaagtcgaaaatgcatttaatacacccaatctaccaaacatcatagcttaggctagcctgccttaaaggtgctcatgacgtttatattagcccccagttgggcaaggttttttgttttgttttgttttgagagggagtctcgctctctcgcccaggctggagtgcaatggctcgatcttggctcactgcaaccgccgcctcgcaggttcaggtgattctcttgcctcagcctccagagtagctgggactacaggtgcgcaccaccacgcccgactaattttcatagttttagtagagacagggttttgccatattctccagggtggtctcaaactcctgacctcaggtgatccaagggcaacgttatctagcaaaaagaagcttatttcataataaagtgttgaatatcatataatttattgaataggtattgaaagggaaaaacagaagggttgtataggtactgtactgaatgtgtgttgctttcacaccatcatgaagtcgaaaaatcttaagtgaaccattgttaactccaggacctgtatatgatttcaaggctttctatgtttccttctaatcatgtattaaaagctctcctgtttatcagtgtttttctccttatgagtctgtcaatcaatttttctttataaagtttgctttacattatgtaaggctgttatagttgatagaaaattttcattactatgaagtgtttctttgtatatcttaaaatgttcttttcttcaaggactattgtactttgtccaatattaatatattttaaaattagagaaagaatatgaggcctaggacgatagtctctttctccattagaatatttttgtttatgtcaggtacctgcaaacactaacagaaaaggtttactttaatctattttcaggtacgaatgtgatttcaagttttgcttcagtcccctagtgaagatgatctatttgccctttatctttactcctgtagtgcagctctttgggttttactaggtacccttctcccgatccccaacttcttccccaaggcccttgaacaacagaatcggtaggtaccaccaagacagacacttccactctaaaattgcaaatcttggctaagatttgctctggctttctaggatacccggaagctcaggttactcggaagtatttccgctccaaggagcggaactatggccggtttcccctggggcattctgggaagtgtagtcaggggcccgcgtagcctggggcacttccgcttttggatggcggagctagggaattgtgggaagtgatccggggtttctctttagttgctgggaagttttttcgctctaggagggcgaaaacaagtgtttggatccgctgggaccctccaagttttctcagcctcgtcagggagcaagcggggccctggccctcgtctggaggaaggctagagaagctgtggccagctgggaggctggagttgggagcagtttgtgttctttcctctcggctgagcctcacgtttggagcagttcttgcgtccccgggttgggagcgtcctggatcggttgtcgcttggttagagggtctcctggcgttccgcagccagcctctcccacctacttgccagctctgccacttactagtgttataacgttttgtgagttaatcttaatctttctctatcccattctcctcattcctgaagtagagtcattagtaggaggtccttgtacttttatacgaattattcattaaatgtccaaaataccgttatgtggtaggtaccacttatgttctaacagagagacgaagataatagacctctccacacaatgtagaaaagaaagctgtcttattactgaataaggacaaccactgtatagtattgtaggcaatctaaagaaaaatattattaaaaaattccgccctatgtgtacagtcaagcagttttaaactttttatacaattctacttttgaccactatgtacatcagttctcaagattaatgatttttcaataagaggacttggtctcatcatttactgcaaattcttttataaatttattctaaatttacttgagaatccagtgttagttaactaactttatcgaaagtaataaaacttctcttacctcatctgctagccgatttacagtttaaagagaggcaccttggttaaactcttgcagtgatagggacagtgggttgttattttctcagatgtttatattcaaaagggacaaatctcagaactttcacaaatacttctaggttgtaaacctggctagaggcttacatagccgctaatgaaatttacatgcgtatcaaaaggttagagaaaggattcagaagcactaggtttcttatggaaatgctctaagaaaaagaagagggaagacgaaccctaaaacgtacagttagtaagaggcagaacgtccatatgaacccaagaagttggagcctcaagtctgtgttcatattctccacgctgtacatttttcttagaaccatatgaaataatcgtgtatatggtttgtggaagtctttttctatcaggtttggaaggtgatctggggctttagagtctatattctccttatagaaataatgcatgaccattatagagagattagaaaatacagaaatgtataaaaggaaatgaaagttacccatattcactgctgtatatttaaacaattagctgggtgtggtggcacataccgatagtcccagctacttgggaggctgaggtgggaggatcgcttgagctcaggagtttgaagctgcagtgagctatgaccacggcactgcactccagcttggatgacagcgagaccccgttcctttaacccataatctcaggatttagagataaccactgctaacattttaaatgcatttatgcattggtgccataccacccacatggtatttctctaatttttcttgtagaaattcccaaacatgcacatacagaaaatagtgttaatgacccccaccccgccatcatttgtctttaactcttgtaaacattttgtctatcttattgcatctattactcttctcccacatatgtttttggtgggaagaggaggaatttgactatttaaaatcaaaaccaaatcctagtcagtcggtagaaattaaaagtaattaacataaagtaattatgaatgaagagcaaaggaaagcaaataacttcagggttttctttcctggcaactaggaggaaggtagttatgtgaaaaacctaaaggagagggaatcattgagatttggaaaggaatagttatgaatttggcttctttatttggaatgttttactcagggtc[364 bp omitted]gctgcatgttactttgttgcaggaactatgtcccattctttaccatgtgcttagcacccagcacaagactggtaaggaggggtttagtgtttgtggtttgtggagctgcccagtatcttgaaatggaaacctgcagatcatttagattgtattcagaattcccaaaatggatttaggaaaaaataaaaggaaataatgtcaatattagtgactctttatctcacttttggtgggatgcatttgcatagtcttctagtttttttcccagtaatcaaaagttgatgcatggttattgataatattttagtgatcaaagcaaatttttgtagaaaccttccatccataatttatgtgtcctgtgtttatcccctgaggttaacatttgctaactttttatagggtagtcatgaatcaggcagaatttccagtgttttacatgtatttattcatttgtacttgatatcaaccctattatagtctccattttacaaatgaagaaaaaggggacagaagaaatggaagcactagtattttaatctagatagctttatactaaggctgtaatattagctactacacactacttttattagtctacaaggcaagaacccacagtaagtcttattagagcagggaatatttaagctatggatgaagaccgtcacccaggagggaaaagagtagcaggttatgacagaaggaacaccaaatacaaagaattagaggctttttgtaggagtacaagtaatccactatggctggacatgtagagtggaaagtggattccaagagagaaacagcatctggaaaattcctgtttgtgcgacttgttaaagcatttgaaccttctcttaagggcactggatagacatgcaggtgaaaataatcaaatttccatcttaggagatatacttaacctctctctgcctctggatcccaaagagtaaactagaggacattatttgttttaaaaaagttgtgaaaatgggctaagtgtggtggctcatgcctgtaatcctagcactttgggaggccggggcgggtggatcacctgaggtcaggaattcaagactagcctggccaagatggcaaaaccccgtctctactaaaaatacaaaaattagctgggcgtggtggggaggggggtgcctataaccccagcgacttgggaggctgaggcaggagacttgcttgaaccttgtgtgagggcggaggttgcaatgagccgaggtcatgccacttcactccagcctgggcaaaagagccaaactctgtctaacaacaacaacaacaacaacaacaacaaaacagaacaaaaaaaaaaagaaaaaagttgtgaaaatgtagtgagggtcccatagtctgaatagtttgaactagttcctggcacatacttggttctttataagagatagttgtatataacagaataaagaatatatatttagtaaatgagaactgcaaacatgtactgtagtagatatgtggatatttttaggtattgctctcttctttcaaccctcaattcttggaaacatcaattccattatacatttaagcaaataaagatcaaggtttaaacactgaagtaataaatttgttcatctttcaaattcagaaactccttgaggaatgattacagaggccctagttgctttgtggagttgatctaccatatgccaaagcttgtgttttctatgtctagctatcctcagtaagcaagttgttctgaattatatgactgtgctattaagaaaagtggaaatccataatatattctgccttcgttgcattttttgattgctctttcattcttttagtatctaaagagtagtttttctattagtcgatcctgttaaatgtaaaaacttaaagggtttcctctgccctttttttttttttttttggaagtggtgggtataattctattagtacaggatcacgtgatctgtttcttataatagttttttttttcttttttttttttttgagacagagtctcactctgtcgcccaggctggagtgcagtggcacgatcttggctcactgcaccctccagggttcaagcgattcttatgcctcagcctcccaagtagctgggactacaggcgcgcgccaccacgcccggctaatttttatatttttagtagagacggggcttcatcatattggccaagctggtctggaactcctgacctcgtgatccgcccgcctcggcctcccaaagtgctgggagtctttttttattttagggctccaattcttcacatatttgctgttactttttgttaataagaaaaacctaaattccactgacatcagagaactgcttcagcctggctaaacagcaataagccgtgaagaggattctggatgttgtagtccgggagctccgagaattttgtcacactctccgtaaccctctctcactcgctcgctccgtttttttttttgtttttttttttttcaagcgcgaagagggcggcacctggatggtttttccttctggaagttctgggaaacgtattccagaactctgtccggaaacaattgggccgcaggagcgcgggccttctgggaagggtagttcaggagctctgggcaggcagagccacttccgccccggaaagcgaggccgccaccatcttttgggtccgggaggtgagtcagccctgcacccccacgacccctcttgaaccttttcagcctgtgcttgggaataggcgctccccagccatcagtcttgggatggagaggtcgcggccgcggcggaggccgagaggccgagggcgggaagtttgctctcctcccgcacttggcaagcagcgccgctagttctgtgggtataataaacagcgagttacctatgatccgcgctcctgtttcctcatctttaaaatagcaataaagatagtcgttactgtgtagggttgtaattagaattaaacaagataatacgggtcaaaccttagaacagtggtggcacctgatactgggttggctcctgctattgatacagtgattccctcacaagcgccctttttactggaagctccagtgaagagagaagaaaagtcagggctttatgccatggcctttctgtcgtatccttcaggagaccgagctcttcccgaacttttacagatcttttttttttttaagaaggattgagtcatcgggctccaatgcgtggggatgtttaccgccgtttatccgggatagagactccatcgtgctgacagcatccttttattcaccgcctccgaatttgcaaagaggaggaaggagggacttcttggcttctcccagcatagccccaggtacctgctcttgaacgcactttgttgttccattttctgtcctttcagttaatcaagtttccgtcactcagtaagttactactgaaaaatgatgaaatatttgttgaataaatgtgagagtgggtaggaaaactacttggaaatgagtattaccaataacatcttaccactttgattttaaggcattcgtctgtggaccatagctattgatgaagtaggtcttgttattttgttatgaggaaattaggcagagtttatgttattaaatactttcccgaagttattcaactgatagtaagaggtggatttgggattgaacccaagcattccttttcagactgtgtgatcttttttgtttgtttttgtttctttggtttttgttgttgtttattttctattcctttttctgagtctgtggtcttaatctcaatgatacagtcgtcttcagttatcttaaatagtaatccatatggctaccggtgagtcgttggaaatcagccttgggaatgtaggtatggattttactgtggaagacctcaaaaactgcactgatgaattttgaattttttagaaaaatcctgcaacatctcacttacttaatttcattccatgtcaaaatatgtcatattctagttatagaagtaatgaatgctcattatagagatgcactatccaatccagtagctataagccatgtgtgccctaggagcacttgaaatgtgtctagtccaaattgagatgtgctgtaagtgttaaatacacactggatttcaaaaactttgtacaaaaaatgtaagatggctcattgataattttttgtattatatgtcaaaatggtaatattttggatacattggcttaaattatgttgttgaaattaacttcacctatttttgtttttgtttttttgccttttttatatgttactgctagaaaatttaaaattatttatgtgtctcagtatatttctattggacagtgatgttatattcagaaaacttaaattacttataataaaactgctaacactttaatgtgtttccctttagtatatgctatggatgtttctcaaaataggtttggtattctgtgtagtagtttttttcttattatgaaaattttcttttttctttttttttctttttttttgtgagatggagattcactcttgttgcccaggctggagtgcagtggcgtgatctcagctcactgcaacctccacctcccaggttcaagtgattctcctgcat[133 bp omitted]tcggcctcccaaagtgctgggattaccggcgtgagccactgcgcccagccgaaaaatttcaagcatattcaactgtcaaaagagtggtgcagtgaattccacgtaaccaacactcaggttcaacatttgctgcagaccatctcctcctccttccaccccacttttttttttttttttaaattagagtgtcttaaagcaggagtcccaacttctgggcagcggacctggtactagtctgtggcctgttaggaacctgacagcacagaaggaggtgattggaggggtaccgcctgagctctgcctcctgccagatcagcaggggcattagattctcataggagggactgcacatgtgaaggatctaggttgtgcgctccttatgagaatgtaactaatgcctcatgatttgaggtggaacctatcatccccaaaccatctcccccgcccccatccgtggaaaaattatcttccgtgaaactggtccctggtgccaaaaaggctgcagatggttgtcttaaagcatacgccagacatcaggtcagttttttttttttttttgaaacggagtctcgcctgtcgcccagaccggagtgcagtggcgccatctcggttcactgcagcctctgcctcccgggttcaagcgattctcctgcctcagcctcccgagtagctgaggtcagttttttttttattttctaccatgacctctgaaactgaagctgtaatttgccatttgctcagtacagtatatcttttttttgttctttttctttcaaacttttttgtcattatgttttcgtagtgtcttttagaatatatatgtataatttttttttttttagtgcagtctgggataatttgcttttactatctgtgtgtatattttgttctcctttcttgtctttttttgttcagtttattcccttttatttgtgctcaactggtctggagtttatatggttttgtgtcattcttctaactttaaaaatattctctttcttagcaaatactaaacttaatcagcatgtgttcttattctgaagaatattgagactaaaaaaaatctgaaagaagatggggccaggtgcggtggctcatgcctgtaatcccagcacttggggaggcctaggcgggtggatcacctgaagtcaggagtttgagaccagcctggccagcatgatgaaaccccgtctgtactaaaaacacaaaaattagccagacgtggtggtgcgtacctgtaatcccagctactcaggaggctgaggtgggagaatcgcttgaacctgggaggcagaggttgcagtgagctgagattgtgccattgcactccagcctgggtgacaagagcgaaactctctctctaaaaaaaaaaaaaaaaaaaaagatgtacctttaaaaaaaaaaaaaaaaaagctatgtttttataggtctactttttattataaccaccctcaaaatttgtcattatagttctttggctttttttaaacaaagattattatattaccaatatagtcacaaatgttttcttaccattgctttttgcagtccatcttttagggttcacatggttataaattctcttcattttttttttcagctaaaatattgtttctttctcatgtaaataatcatctagttgaacatagaattcaggttgacagtttctttattttggaggtaatattcatttgttttaaatctccattctgttaccctatttctgtcaatctaattgttatttcttttaggtcaactatattttctttctaggagctttaaggttgttgtttccagttctttatgttcgtttagtcttttgcatttctgagttttattgtgatttgtttagggtatgtttatttttatttatactgtttagaatttctatatgcgaacttgtatcttttaccaattgtgtgaaattctcagcaattgcatcttgaaattaaaacctctcagtcattccctccatcctgccttctcttctcccattcctgttagacaaatacggaagcctctcaatttatctttcatgtttcttgatttttcgtttgtgctttatctttctctttgctgtgtgtttttctctgtgcacataaaataaaagagatgtaccaatgatcgtttccaggcttcatgaagtaaattgacccagaatgatacgttttagaaaactgataacagtgtcagtaaaatattactagctgggcaacaaattactaaaaagaaaccttaagtcagatttcggcttttcagaaattaaaggtgactttcatag[135 bp omitted]cctccaccttccaggttctagcaattctcatgcctcagcctcccaagtagctgggattacagacccgcaccaccacgcctggctgattttttttatttttggtagagatgaggttttgccgtgttggccaggctggtctcaaacttctgaccttatgtgatcctccctccttggcctcctaaagtgctgggattacaagcatgagccactgtgccaggcctggctaaacagcaagaagccatgaagaagcttttttgtaactataagagaaagggactcctggttcttagaactctccatctacttatttaatccttggaaaaaccctatgagggaggtacgatttatgattcttaccatatcctcattgtacacataacagaagtgaggcacagagagggtttttaatatccccaaggttacacagctggtaagtatcatttctaggaattaaacccagatacttgacttgagagccctcatatgttgttacattgcctctcgtttcctgctgtctctgccatcagaaatccttgtagcaaggatgctgcacttgtgcagactgttcactgcccaatggcactgaactatcatgccatttagtagctggaatacagtccatgttctgcttaccaagctgtatgtggctatacctgtctgaatgtagggctatttctctaatttcctcatatgtacacatgggctaacagcaggcttgtgtctcatggcgtctttggtctcccccagttatgccatctcagaactatgaccttccccagaagaagcaggagaaaatgaccaagtttcaggtacgtaaaggattccttgctgtcttttaaaatgtgatttatttctcaaagataacagatttattttttctctttcttggaaaggttagtgggaaacagatattcaggacatgtggtatgctgacatgtatgtgtttttttgttttagtttatcacctttactattttacaaaacagtgtttgaaaaaataatagaagctttaatcagaaataatctatgctactaccctgcttatgaactagcttttttcattttcccatgttcctttttcatacacattttgcaatacttgagtagatgaaattttcaattgtgcattctccacttaattgcatcacctgcattgtaagtgagtacatcatatgccattgaattgcagtgcccttaaaagacaacaaaaactatttcttatttagcctttcagaaattcagaaattttaagaattttactactttaaagtaaatccagtgacttttttccctacatataaaaacaattccttcaaaagaaattctggtggaattcaatattatttgtccttaaagttttaggaactctgcattgaagaggtttatgtctcagtttcatgtcagttccctcaggtgttttgtaaacagaacatctaaagaatgacatggtgtaattttattagatgctttcagagaagaagagctatatatttttcccgtttatgtttttatcactcatttatttcttgtatgaatttatttcatcaaagtaactacatgtacgtaaggtctagtagtacttagatgtcttgctagccctttccatctgtcattgcatttttcagatgtgaggatggagatgatttatttgcattttaaatatgaagaaacaggttatgggaacattttataactgccccaaatttcccaggtagctgactcattggacactgaagcttccaactattaggaatatctggcattctattttcatgtaaaggcagacagaacaaaagagttttccattcacagagatgagcacatatgatagaagtacctgatgttacctttttattcttttgagacagagtttaattcttgtcacccaggccggagtgcaatggcatgttcttagctcactgcaacctctgcctcccaggttcaagcgattctcctgcctcagcctcccaagtagctgggattacaggcatgtaccagcacgcctggctaattttgtatttttattagagacggggtttcaccacgttggccaggctggtcttcaactcctgacctcagatgatccacccacttcggcctcccaaagtgctgggattataggcgtgaaccagtgcacctggccctgatattaccttttggaggatagaccccaacaatgcccctcatccagtttccatctcaattactgtctcttctctagttttgtctcttagtcattccatgaacgtagatgctcaagcacagtttttatgtaagtgttttaaatttccctacagcaaaagctatcaggtatgatggtaagagacagcagcaaaccggtggcatatacttaaacattaggtaaaggtctaatagcttaaattcctgttaagattagtaatatagagaaaattccaactggaatatgagcaaaagaaatgaataggagtgtcataaagaaaagaaatttatgaaaaaaacttcactaataatttaaatgtgtgaaaatgttaataaaatagctttctatttatatattggttttacttatattgtcaatgacttttttagaaaaaggaactgagtcctatttagccggggtctagagattcaggaatgcttgtactgttgcatgaagagtgaactgggaaaatctttggagaggaaaatctgccattacgctttcaaaacttttttttttggatgttgattttcttttatttatttatttatttatttatttattattattatactttaagttttagggtacatgtgcacaatgtgcaggtttgttacatatgtatacatgtgccatgttggtgtgctgcacccattaactcgtcatttagcattaggtatatctcctaatgctatccctccccactccccccaccccacaacagtccctggagtgtgatgttccccttcctgtgtccatgtgttctcattgttcaattcccacctatgagtgagaacatgcagcgtttggttttttgtccttgcgatagtttgctgagaatgatggtttccagtttcatccatgtccctacaaaggacatgaactcatccttttttatggctgcatagtattccatggtgtatatgtgccacattttcttaatccatctatcgttgttggacatttgggttggttccaagtctttgctattgtgaatagtgccagaattaacatatgtgtgcatgtgtctttatagcagcatgatttataatcctttgggtatatacccagtaatgggatggctgggtcaaatggtatttctagttctagatccctgaggaattgccacactgacttccacaatggttgaactagtttacagtcccaccaacagtgtaaaagtgttgctatttctccacatcctctccagcacctgttgtttcctttttttttttaactttaaaaaaatgttaatagaaaaaaaatgcccagataaagataccgatcacagtatccacatctatacaatgattgatccagctgtggccctcccctctcacccagccccatgtggcttcctttgaaactgcagactggagatgacagtggtgaattctagtcctactcactggatatcagcatttcttttttttaaaattttattattattaaactaagttttagggtacatgtgcacaatgtgcaggttagttacatatgtatacatgtgccatgctggtgtgctgcacccattaactcgtcatttagcattaggtatatctgctaatgctatccctcccgcctcccccaaccccacaacagtccccagagtgtgatgttccccttcctgtgtccatgtgttctcattgttcagttcccacctatgagtgagaacatgtggtgtttggtttttcgtccttgcgatagtactgagaatgatgatttccaatttcatccatgtccctacaaaggacatgaactcatccttttttatggctgcatagtattccatggtgtatatgtgccacattttcttaatccagtctatcattgttggacatttgggttggttccaagtctttgctattgtgaatagtgctgcaataaacatacgtgtgcatgtgtctttatagcagcatgatttataatccgttgggtatacacccagtagccataaaaaatgatgagttcatgtcctttgtagggacatgaacatacatgtgcatgtgtcttcatagcagcatgatttatagtcctttgggtatatacccagtaatgggatggctgggtcaaatggtatttctagttctagatccctgaggaatcgccacactgacttccacaatggttgaactagtttacagtcgcaccagcagtgtaaaagtgttcctgtttctccacatcctctccagcacctgttgtttcctgactttttaatggttgccattctaactggtgtgagatggtatctcattgtggttttgatttgcatttccctgatggccagtgatggtgagcattttttcatgtggtttttggctgcataaatgttttcttttgagaagtgtctgttcatgtccttcgcccactttttgatggggttgtttgcttttttcttgtaaatttgtttgagttcattgtagattctggatattagccctttgtcagatgagtaggttgcaaaaattttctcccattttgtaggttgcctgtccactctgatggtagtttcttttgctgtgcagaagctctttagtttaattagatcccatttgtcaattttggcttttgttgccattgcttttagtgttttagacatgaagtccttgcccatgcctatgtcctgaatggtaatgcctaggttttcttctagggtttttatggttttaggtctaatgtttaagtctttaatccatcttgaattaatttttgtataaagtgtaaggaagggatccagtttcagctttctacatatggctaaccagttttcccagcatcatttattaaatagggaatcctttccccattgcttgtttttctcaggtttgtcaaagatcagatagttgtagatctgtggcgttatttctgagggctctgttctgttccattgatctatatctctgttttggtaccagtaccatgctgttttggttactgtagccttgtagtatagtttgaagtcaggtagcatgatgcctccagctttgttcttttggcctaggattgacttggcgatgtgggctcttttttggttccatatgaactttacagtagttttttcctattctgtgaagaaagtcattggtagcttgatggggatggcattgaatctataaattaccttgggcagtatggacattttcacgatattgattcttcctacccatgagcatggaatgttcttccatttgtttgtatcctcttttatttcatcgagcagtggtttgtagttctccttgaagaggtccttcacatcccttgtaagttggattcctaggtattttattctctttgaagcaattgtgaatgggagttcactcatgatttggctctctgtttgtctgttattggtgtataagaatgcttgtgatttttgtacattgactttgtatcctgagactttgctgaagttgcttatcagcttaaggagattttgggctgagacaatggggttttctagatatacaatcatgtcatctgcaaacagggacaatttgacttcctcttttcctaattgaataccctttatttccttctcctgcctgattgccctggccagaacttccaacactatgttgaataggagtggtgagagagggcacccctgtcttgtgccagttttcaaagggaatgcttccagtttttgcccattcagtatgatattggctgtgggtttgtcatagatagctcttattattttgagatatgtcccatcaatacctaatttattgagagtttttagcatgaagggttgttgaattttgtcaaaggccttttctgcatctattgagataatcatgtggtttttgtctttgggtttctttatatgctgtattacatttattgatttgcgtatgttgaaccagccttgcatcccagggatgaagcccacttgatcatggtggataagctttttgatgtgctgctggatttggtttgccagtattttattgaggatttttacatcaatgttcatcaaggatattggtctaaaattctcttttttggttgtgtctctgcctggctttggtatcaggatgatgctagcctcataaaatgagttagggaggattccctctttttctattgattggaatagtttcagaaggaatggtaccagctcctccttgtacctctggtagaattctgctgtgaatccatctggtcctggactctttttggttggtaagctattgattattgccacaatttcagagcctgttattggtctattcagagattcaacttcttcctggtttagtcttgggagggtgtatgtgttgaggaatttatccatttcttctagattttctaatttatttgcgtagaggtgtttgtagtattctctgatggtagtttgtatttctgtgggatcagtggtgatatcccatttatcattttttattgggtctatttgattcttctctctttttttctttattagtcttgctagcggtctatcaattttgttgatcttttcaaaaaaccagctcctggattcattaattttttgaagggttttttgtgtctctatttccttcagttctgctctgattttagttatttcttgccttctgctagcttttgaatgtgttagctcttgcttttctagttcttttaattgtgatgttagggtgtcagttttggatctttcctgctttctcttgtgggcatttagtgctataaatttccctctacacactgctttgaatgcgtcccagagattctggtatgttgttctttgaaaccaatgagaacaaagacacatctttatttctgccttcattttgttatatacccagtagtcattcaggagcaggttgttcagtttccatgtagttgagcagttttgagtgagtttcttaatcctgagttctagtttgattacactgtggtctgagagacagacagtttgttataatttctgttcttttacatttgctgaggagagctttacttccaactatgtggtcaattttggaatagttgtggtgtggtgctgaaaaaaatgtatattctgttgatttggggtggagagttctgtagatgtctattaggtccacttggtgcagagctgagttcaattcctgggtatccttgttaactttctgtctcgttgatctgtctgatgctgacagtggggtgttaaagtcccccattattattgtgtgggtgtctaagtctctttgtaggtcactcaggacttgctttatcaatctgggtgctcctgtattaggtgcatatatatttaggatagttagctcttgttgaattgatccctttaccattatgtaatggccttctttgtctcttttgatctttgttggtttaaagtctgttttatcagagacaaggattgcaacccctgccttttttttgttttccatttgcttggtagatcttcctccatccttttattttgagcctatgtgtgtctctgcacgtgagatgggtttcctgaatacagcacactgatgggtcttgactctttatccaatttgccagtctatgtcttttaattggtgcatttagcccatttacatttaaagttaatattgttatgtgtgaattttgtcctgtcattttgatgttagctggttattttgctcgttagttgatgcagtttcttcctagccttgatggtctttacattttggcatgattttgcagtggctggtactggttgttcctttccatgtttagtgcttccttcaggaggtcttttagggcaggcctggtggtgacaaaatctctcagcatttgcttgtctgtaaagtattttatttctccttcacttatgaagcttagtttggctggatatgaaattctgggttgaaaattcttttctttaagaatgttgaatattggcccccactctcttctggcttgtagagtttctgccgagagatccgctgttagtctgatgggcttccctttgtgggtaacctgacctttctctctggctgcccttaacattttttccttcatttcaactttggtgaatctgacaattatgtgtcttggagttgctcttctcgaggagtatctttgtggcgttctctgtatttcctgaatctgaatgttggcctgccttgctagattggggaagttctcttggataatatcctgcagagtgtttccaacttggttccattctccccgtcactttcaggtacaccaatcagacgtagatctggtcttttcacatagtcccatatttcttggaggctttgttcgtttctttttattcttttttctctgaacttccgttctcgcttcatttcattcatttcatcttccatcactgataccctttcttccagttgatcgcatcggctcctgaggcttctgcattcttcatgtagttctcgagccttggctttcagctccatcagctcctttaagcacttctctgtattggttattctagttatacatttgtctaaatttttttcaaagtttttaacttctttgccatttgtttgaatttcctcctgaagctcggagtagtttgatcgtctgaagccttctctcaactcgtcaaagtcattctccatccagctttgttccattgctggtgaggagctgcattcctttggaggaggagaggcgctctgctttttagagtttccagtttttctgctctgttttttccccatctttatggttttatctagttttggtctttgatgctggtgatgtacagatgggtttttggtgtggatgtcctttctgtttgttagtgttccttctaacagacaggaccctcagctgcaggtctgttggagtttgctagaggtccactccagaccctttttgcctgggtatcagcagcggtggctgcagaacagcggtggctgtagaacagcagatattggtgatctgcaaatgctgctgcctgattgttcctctggaagttttgtctcagaggagtactcagctgtgtgaggtgtcagtctgcccctactgggggggtgtctcccagttaggctgcttggaggtcaaggacccacttcaggaggcagtctgccggatctcagatctccagctgcatgctgggagaaccactactctgttcaaagctgtcagacagggacatttaagtctgcagaggttattgctgtctttttgtttgtgccctgcccctagaggtggagcctacagaggcaggcaggcctccttgagctgtggtgggctccacccagttcgagcttccaggctgctttgtttacctaatcaagcctgggcaatggcaggcgccctcccccagcctcgctgcctccttgcagtttgatctcagactgctgtgctagcaatcagcgagactctgtgggcgtaggaccctccgagccatgtgcaggatataatctcctggtgtgccgttttttaagtccattggaaaagcgcagtattagggtgggagtgacctgattttccaggtgccgtctgtcacccctttctttgactaggaaagggaactccttgaccccttgtgcttcccaagtgaggcaatgcctcaccctgctttggctcacacccagtgtgctgcacccactgccctgcgcccactgtctggcactccctagtgagatgaacccagtacctcagatggaaatgcagaaatcacccgtcttctgcattgctcatgctgggagctgtagaccggagctgttcctattcagccatcttggctccacccctcaaaacttttaaagtaaatattctatgactttgcagttgctacttcttggccatgagctctgtaaaaggatctttgtagtattggttataagtaaaaatctgtaattaattgtacattatttggattggttagagataaatcttcagttccaaggaatcctgttgtatgtagtcacaaaataggacaaaagagatgataaagatatgcgttgttcgagtttattgagcatgtatggtgtgctaggcacttctaagtgcttgacatatattcattcatctgatcctttcaaacactttatgatctatttattttaattctaaaaatttatttattttaagacagtgtctcacccctgtcacccaggctggagtgcagtggcgccatcttggctcactgcaacctccgcttcccaggttcaagtgattctcctgcctc[133 bp omitted]cctcggcctcccaaagtgctggcattacaggtgtgagccactgtgcctagcctgaaaatttatttttaaaaattgagacagggtctcactctgttgcccaggctgaagtgcagtggcacaatcatggctcactgcaccgtcaaactcctgggctgaagtgatccttctgtgtcaggctcatacaccttataatttagatacaatgataaagaagaggaaattcagttagtgagagattaaggaatttgcccaaggtcctataactagtaaaaggcaaaaccttgaaatttgaacctggccagactccagagccagtgctttaaattaagcagctgtgcatcctgtagtaggtggatgtgacatgtgccttgaaagcacaggaagagctatatacctgtccagggggttgctgaaggcctgtgaactttgcaaacgttaaaaacaatgatagggccaggctcagtggctcacacctataatcacagcactttgggaggccaaggcgggcagatcattggaggtcaggagtttgagaccagcctggccaacatggtgaaaccccgtctctactaaataaatacaaaaattagccgggcatggtagtagacgcctgtaatcccacctacttgggaggctaaggcaggagaatctcttgaacccgggaggcggaggttgcagtgagcagagattgcgccactgctccagcacgggtgacagagtgagactccatctcaaaaaagaaaaaaacaaaaaacagtgataaactacaggctttatggggatgagcgtaggagatagtgagacagggaaaactgtaacagctgaaaattgactgagatctcttggaatctataacaacttttttgtggtgctcttttccttcttgatgccacccttcttctagtgaaggttggttgtaagattgaggttacatgtgtttgatattgtaggaggctgtgacattcaaggatgtggctgtggtcttctccagggaggaactgcgactgctcgatcttacccagaggaagctgtaccgagatgtcatggtggagaacttcaagaacctggttgcagtgggtgaggacaggcactctctgaccctgaacttcagttcccttgagaatctctttgctctcaggtgtttaagggtttggaccttttaaaatggttctttgctcttgaagacaaaaggttttctaatccctgggaaaacaggataggtttttctggtctttctgctcaggcaaaattctgtccttttaaattgctggttctcaaccatgggtgatttcgcccccagaagatatttggcaatgtctggaaatggttgtcacacctgacagaggggtgctattggcattttgtgggtagtatccaggaattctgcaaaatctcctacagtgcacaggacagtgcccccaacagagaattggccagtccaaaatagtagtgctgcagttgcaaaaccctgttttaaatgaaccgtaaatggacacattagcttctatgctttatctttcaaatacgttgtctttcaaatgaaacccatcaatgcattaacttagtgcactgtactggcttttttttcaatgaaataaaacagataaggatagaaaatatcagagcttcttatcaggaactgctcacattgcaacaaaaactgacaattttcagtgaatggtgtgagatacagcattgcaaatgtgatgaaaacagacattagccaagtataacttgagagagagatatattatatatatatgaactaggctacaacctaaatttcttattatagttcatgatcttaaaacatcttaaaataaatcactctagaggccgggcatggtggcttacgcctttaattgcagcaatacgggaggccagggtgggtggatcacttgaggtcacgagttcaagaccatcctggccaacatggtgaaaccccatctctactaaaaatgcaaaaattagccgggtgtggtggcaggtgcctgtaatcccaactactcgggaggctgaggcaggagacttgcttgaaccctggaggcagaggttgcagtgagccgagattgtgccattgcacttcagcctgggcgatagagtgagactctgtctcaaaataaataaataaaataataaaatatcactatagaggttgtgaggcttatagggttcagacaaaaatgtgttttagttgtgtgttcatcttaaatacataaaaatctacattttcatagggcatcttcccttccaaccagatatggtatcccaattggaagcagaagaaaagctttggatgatggaaacagaaacccaaagaagtaggtattctggtgagaaccctgtgtctgttctttcaggtactggttagtctgcatcttaccatgtccatgacctccctggtctgagtgttaaaatctttcacctggattataacaatagcttccatgctggtctccccacctcctcccttgtgctcctataatctgctttctaaatggtagccggagtggttctttttttaatctttatttttttgagacagggtctcaccctgtcacccaggctggagtgcagcagcatgattgtagctcactgcagcctcaacctcctgatttcaagtggtcctcccacctcagcctcctaagtagctaggactataggtatatatcatgatacctggctaattttttattttttgtagagatgaggtcttgctgtgttgcccaggctggtctcaaactcctggactcaagcagtcttcccacctcggcctcccaaagtgctgggattacagatgtgagttgccgcacccggcccagaatggttctttaaagaacacatgagatgatgttattcctctgctcagaagccttcacaaccttcccatttcactcaaagtccttgtactgaactgcaagaccctacctggtctcatctcaccaagtttctctttgatctcccattcctttccctttgcttagatcatttcagccatgctggccgccgttggagtatttgttaagcataccaagttcccttctcttccatggcttctaattagctctcctcattgccttggtggagaggctccccagcaccttacttactgcactcaggtcattcctcaaatgttatatcattagagaggccttctatgtttaaatttaccattttaatttaaaataccatcttccttccattttccatccccttacctttcctttctctccttctttgctttctcttgaatttgcatattcctcaggtctattgacttaaaaattaaaagtaagctgggtatggtggtacatacctgtaatcctggctacatgggaggctgaagtgagaggatcacttgagctgaagagttccagaccaacctgggcaacatagtgagactccatctctacaaaaaaaaaaaaaaaaaaatatatatatatatatatatatatatatcttagccaggcatgttagcatacatctgtagtcccagctacttgggaggagcatcaagtgagcccaggaatttgagaccaacctggacaacatagtgagaccttgtctcccacacacacaaaattaaaagtaaaaattagatattcctagatgatgtgaattttttttttttttgagaccgagtcttgcttgctctgtcacctaggctggaaagcagtggtgccatcttggctcactgcaacctctgcctcccgggttcaagtgattgtcctgcctcagcctccgaagttactgggattacaggtgaccaccaccatgcccaactaatttttgtatttttaatagagatggggtttcaccatgttggccaggctggtattgaagttctgatcttacccactttggcctcccaaaagtgtcacccaggctggagtgcagtggcatgatcttggctcactgcaaccttcgcctcctgggttcaagcaattctgctttagcctcccgagtagctgggattacaggcgcctgccaccacacccggctaatttttgtatttttagtagagatggggtttcaccatgttggccaggctggtctcgaactcctgagatcgtggtccacctgtctcagcctcccaaaatgctgggattacaggcatgaaccaccatgctcagccaaagggtttgtttttataagaattcttaacaaaaaacttacagagaatggagacaagtagatatcacatcccttttactcagagttagctcatagattgagagcacaccagtgtgattaattatttgggaacactgtcttctagtgaatgtctaacataattagtaatttctaagacatttttggacatgtaaatattcaaacctactaaccttagaagataaaagctattcacagttgttggaatgtagaacttcactatcaaaaattatcagtggcaatatggcaggtattatagttcatcagtttccctgtatcaatttcaagttggctttactcattggtgaaaactgccttatccatacagctgacttcccactttcccatttccccttccctctaataccaaaacagttatataacctacatacagtagttctttagcagttttgaattggacatttccagaagtccagaggcactgacatacctgtggagttgaggtgagtcctgattaggcaaagaaaattccagaatttctaaattgggtttccagtgtaatttgcatccacatgtattaatcttagcttctagcaccagcaatgtgagaagcactttacatgttgcagtgacttctgacaccaaacacctgaagttaggccggactttcagagtaagggcatagttttccacaagactgctctctatatcgctctaagtttatatatcgctctaagtttagggattcccagataattttgctcacctctgaccaagtagctacaaatttgggagttcccgtgataatttgttagaatgactgacagaactcgggaaggtgctggacttacagttttattatagcaaaaaagatacatgttggaagcagcaaaagggagagatatatagggtgaaatctgggtggcttccctctttcttcccttttgtaaggacttgtgattactttaggctcattggataatctaggataatctccttaagagctttcatttaatcatatctataaattgcttgtttttttgttttttttttttgtagacggagtcatgctccgtcgtccaggctaaagtgcagtggtgcaatcttggctcactgcaacctctgccttctgggatcaagcgattctcatatctcagcttccctagtagcttacaggtgcctgccaccatgccaggctaattgtttttttagttttttagcggagacggggtttcaccatgttgtgggccaggctggtctcgaactcctgacctcaagtgatccacctgcctcggcctcacaaagtgctgggattacaggtgtgagccactgtgcctggcctgtaaattcctttttgccatgtacattaactattcacaggtttgagagttcaggctgtggacatctcttgggggtggggtgtcattactcagcctgccatatccagaaatgtgtagacacctgttgctatttttttttcagtttgtattattagaatgtaacatttcatttaggcaaattatttgattaggacttggtaaaccaccccctaaacattttaagccaaggtctttcatacgtttctaaccatgaccctcaacataagtataattttacatcttgactaagcataaatatgtttatatttatgtgtatatttaccaactaaaacaagtatttcctatagtagtactcttattgcttttaatacactaagcatgtcttattctgttttttgtttttttgtcagtcacaagttacatacttggtttcatggtgcactaatgcattgcaacaatttgaaaacccttgttaacagtggggataaagcaatgaagaaaacaaaatgcgtgtttttttcatgaccgttacattctactgggtctaaagagacaaaggaaagtatatagtaaatcaaataataagtactgtggggaaaagtcaagcagggtaattgaactggaaagagtcgaaggtgtatggcaggccgggcgtggtggttcagcctgtaatcccagcactctgggaggccgaggtgggcagattacttgaggtcgggagttcgagaccagcctggccaacatggcaaaaccccatctctactaaaaatacaaaaattggctgagtgtagtggcatgcgccagtaatccccgctacccgggaggctgaggag[134 bp omitted]tacatcgtgtgttatggaaggcatcacagataaagtaacatgtaacatgtgagcagagacctgaagggagcgagagaacaagcaaggctccctgctttctgggaggaagtttccaagctgaacatacctctccctctcttcgtcttctgtgttggctttgagagtttgcactatgctctatttcctctccgaagttctctcctagttatacaagattagctttcccttttccacttgtccagagacctggatttctaccaggttttagaacaatcatattattccaactgccttcccaaatctgttggagaataatttctatcaggatctaaaatagtatttcatgcctacagtctgaacttttcttaacctaactagttattagaatcccgcttgtcataagcctactgaggaagaggtgagtaggctgttcattgatgttattgtaggttggaatatggattttctttttgttgccctgcagctacctgattttagcttttagctctcatattaaactgttagacttacggttctacatggatcatgtttatacttagtgaatgggagcctgttgaccccactcttcgtttacacctgtatgaaaaacatgtcaaaagaatacacgatgctgtaaggacaaggtcacctttcgcctggtttatcaaggctttctcccatggcctaagtgtgaaattctgatatttctgaagaaagcatttactgccctcatctctaaatattgccttttttcttttttaataggcagcaagcatcaaaataagatggaaacactccaaaaatttgcattaaaatacctttcaaatcaagagctgtcctgctggcaaatctggaaacaggttgcaagtgaattaaccaggtgtcttcaggggaagagttcccagttattacaaggtgactctattcaggtttctgaaaatgagaacaatataatgaaccctaaaggagatagctctatttatattgaaaatcaagagtttccattttggagaacccagcattcttgcgggaatacatatctgagtgagtcacagattcagagtagaggtaagcaaattgatgtgaaaaataacctgcaaatacatgaagacttcatgaagaaatcaccatttcatgagcatattaaaactgacacagaaccaaaaccctgcaaaggtaatgaatatggcaaaatcattagtgatggctccaatcagaaattacccttaggagagaaaccccatccatgtggtgagtgtggaaggggcttcagttatagcccaaggcttccccttcatccgaatgttcatacaggagaaaaatgcttcagtcaaagctcacatctgcgaactcatcagagaattcacccaggagagaaactcaatagatgtcatgaatctggtgattgcttcaataagagctcttttcattcttatcaatctaatcatacaggagagaagtcttatagatgcgacagttgcggcaagggattcagtagcagcacgggtcttatcattcattacagaactcatactggagagaaaccctataaatgcgaggaatgtggtaaatgctttagtcaaagttcaaattttcagtgccatcagagagtccacactgaagaaaaaccatacaaatgcgaagagtgtggtaagggcttcggttggagtgttaatctccgtgttcaccagagggtccacaggggtgagaagccctataaatgtgaggaatgtggtaagggcttcactcaggctgcacattttcacatccatcagagagtccacactggagagaaaccctacaagtgtgatgtgtgtggtaagggcttcagccacaattcaccattaatatgccatcggagagtccacacaggagagaagccatacaagtgtgaggcgtgtgggaaaggctttacccgtaatacagatctgcatattcatttcagagttcacacgggagagaaaccctataaatgtaaggagtgtggtaagggcttcagtcaggcttcaaatcttcaagtccatcagaatgtccacactggggagaaacgattcaagtgtgaaacgtgtgggaagggcttcagtcagtcctcaaagcttcaaacccatcagcgagtccacactggagagaaaccatatagatgtgatgtgtgtggtaaggacttcagttatagttcaaatcttaaactacaccaagtaattcacactggagaaaaaccatataaatgtgaggaatgtgggaagggcttcagttggagatcaaatcttcatgcacatcaaagagttcactcaggagaaaaaccctataaatgtgagcagtgtgataagagcttcagtcaggccatagattttcgggtacatcagagagtccatactggagagaagccatacaaatgtggtgtctgtggtaagggcttcagtcagtcctctggtcttcaatcccatcagagagtccacacgggggaaaagccatacaaatgtgatgtgtgtggaaagggctttagatacagttcgcagtttatataccatcagagaggccacactggagaaaaaccttacaaatgtgaagagtgtgggaaaggctttggtaggagcttgaatcttcgccatcatcagagggtccacacgggagagaaaccccatatatgtgaggagtgtggtaaggccttcagtctcccctcaaatcttcgagtccacctgggtgttcacaccagggaaaaactctttaaatgtgaagagtgtggtaaaggcttcagtcagagtgcacgtcttgaagcccatcagagagtccacactggagaaaaaccatacaaatgtgacatatgtgataaggacttccgtcaccgttcacgtcttacatatcatcagaaagtccatactggtaaaaagctttagaaatgagaaatgtgttaccaacttttgtctgaatgcacatcttcaagtttttggctagtccatgctggtggtaaaccctgtaaaactactgagagtggaagggggtttgttcacacttggaatctttctaacaaatccatcaagatgataacacagaaccatgaacaggaatagaactcgtatttaggggagaaatagggctggtggctctcttggtaagatctagttaatataaatgatcacctttcattgtgaatatatgcctgaagataatgtgtggaaggatatttgccatatgctaactggttttttggccagggagagttttgggttattatcccttttctttaattttcattttatacttacagtgatcattattttcataaaagctgtaaagctatgaaaaatgaataaaattactaaaaattttctgtagctaaggactcatgattcttttatatggtatataggtgtaaaattaaggaatatatccccagagatgaatctttgatcttcagaagtaa[139 bp omitted]ggtgaaaccccatctctactaaaaatacaaaaaattggccaggcatggtggcacgtgcctgtagtcctagctactcgggaggcggaggcaggagaatcgcttgaacccaggaggtggagttcgcagtgagccaagattgcgccactgcactccagcctggtgacagagcgagactccatctcaaataaataaagaagaaagagagagagagagcaagagaaagagaaaagaggatagtcggtgcatcattgttttagtagcaaacatagaaatacttggattgccaaagtattttgtgctttaccaatccagtggcacactatgcagacatcaaatgggaaaaggtaaatttttagctgtggatattggaagatgttcagaatatattaacttgaaaaacaaaatgtgagatttttatgtgatcctattttgtaaaaacgcatagatgaatgggtattatagttctctctaaataatgggattttactttatgtatatttttatatttctttaaacttattttgaaataatttgaaactttcagaaaaattacagaaattatataaaagctcccatatactctttacccagattcaccagttgttaagatgtttgaattattctctcaataagtatgagcgtgtatatactgatacttatacatactaaacgcatttatatataaagttttgccatatgaatatgttacagacatccttctccctacactaaatacttaagtgtgctttcctaagaacaaggatatctacttagttacagtacaacattccagtgatttatttatttagagacagggtctcattctgttgcccaggctgagtgcagggtggtgattatagctcaccgcagccttgaactcctgggctcaagcaatcctccccactcagcctttcaagtagctgggactgcaggcgtggaccaccatgcccacctaatttttaagatttttgtagagatgggctctcgctatgttgtctaagctggtatcgaactcttgggcttaagtgatcgttccacctcagccttccaaaatgcaaggtttacaggcatgagccactgcacccagaaagaaaatttattattgatacataacactatgtaacctacagaccttatttaaatcttaaaattatcccaataatatatttattgtttttctgctctagagtccaaagattacacattgcatttagactcctttaatctgagttgctacctctgtttttaatgaccttgatatttttgagattattttgtagaatgtctcttaatttggatttgcctgaggtttccttacaattggatttaaattacacatttttttcccatgaggactctgtaagtggtgtgcagcacgtgaggaaacgaggtatgtttgtacctttataggtgatgttaacttggaacacttgattggggagggcggtgctgggtttttccactgcgaaattactatttttttctttgtaattaataattacaaaggcaactcctggggagacactttctgactctaaatagcttgtttttcagtaaattttcctccactagtttaagcattctgtaagtctggtctaaatcagtaattgctctgatggtgcgaaagtgtgatatattcaactttcatcattcctccaacacttgttagattgttgttctactctaaggaagtttcccttctgtcctgtttgcccatcatgtatttttaaataaattggagcacatctttactctgacacaatacagtgttccaagctcatcttgtacccttcctgcaccatccatggaatttgctgtttctttgagaactcagattcttctgattgggggatggtagttaaacatcaagatctgggtaatagctgtgcctttttttttttccctctaggaaggaggggaaagagttatacagataggaagagaagtagaaaggtagaaagaattaatgatgagttcctgcttttatctctagttcttaaattaatatcatagtgttttttttctagccttacccccattctatgttgcatcttcattcttcaagaatcagaaatttgtctcccagtatcattcatatatttactggggaatgtggacatgcatccaactagaacttgggggttctgtctttcagagagaacgggagtattggatgactgatgccagagatgatttttgaatggcatagtctcccaaacattataatttttcctattctcagggtattgaccctttaaaccaaataaaatgttcccgtagggccatgaagaaaagtatctgatagaaatatccaaagatagatatattcagatgagagccttccagtcaatgtttccttgcagatagtgttaaggaatggtttctggtgaagtgttgcggagctctcctagcctgtgagtgtcacggatgccattgattagcattgctttactttatttacctctcattctctgaaccttctcagaggtagtttgacaaagttctcaaagcacatccctctactgcttcttgagaggaccaaggcattttaggagaaactagtgttaacgagaccaagtcagaatattggtaataaagtagtagagtataatagaaagcagactgtcagccaggcacagtggctcacacctatagtctcaactactcaggaggctgaggtgggaggatcacttgagcccaggagtttgaagctgcagtgagctgtgattggaccactgcattccagcctgggtgacagtgagaccccatcttgaaaaagccaactgggtgcagtggctcccgcctttaatcccagcactttggctggccgaagtgggtggatcacctgaggttaggagttccagaccagtctagtcaacatggtgaagccctgtctctactaaaaatacaaaaagttagccaggcgtggtggttagcccctgtaatcctagctattcggctgaggcaggagaatcaattgaacccagcaggtggatgttgtagtgagctcagatcgtgccattgcactccagcctgggcaacgagtgaaactccatctcaaaaaaaaaaaaaaaaaaagaaaagaagaaaagaaaaagccaaccctggaaccctggaattagactttcttgctcagtgtaaccatttgctagttgcgtaactgcaggcaaaatgcttaacctctctattcctcaatttgcttgtgtcttcaatgtttgaggataatatcttttagttctgtggtaagggttaaaactatatgcctggcatatagtaagacctgtatagtgttaactattattttcaacatagatgtcactattactagatttctgctaatttatatttgaaatttctaaggaagggatcagtaaactatagcctgctggccaaatctagcctgtgtcctctctttgtacaacacgagagctgagattttaaatgtttaaagagttgtaagaaaaaaaaaatgctacagagaccatctgtggcccgcaagacttaaaacattactgtctggccctttttaggaagtttgccgttctctgatctaagcaaattttagtttctcagaagccttgcttctgagatacatacatactacagatatgtattatctcaattcagtacttctcaaatcttttaggtttaaaaaaaatgctcgaattgacataagaaaacacaagcatattttttacagaaaattgggaccatatatgaagcaatgtgctgtgtgtccaatgtgtagttaatctgcaattctatgaataaatgttattggtttttttttttttttttggtaagtaaacttaggttttacaggtttaagtaccttccctaagtcagtcagtagtgaatgtcacaaccacagtttgaactcaggtctatcttgctgacttcaaaactactcttaaatgctatgtgcataaattacattgcaaggccagaactcctaagtttacattctgtagagcatgcatcccatttcacacaagtaaagtgcaaatataagaatggaatatccttcaaaaagaacgaaatttgcctaggaagtcttttgctccatttcgactcaggcttttcctatactaagtcaataatctaggcaagcttgtccaacttgcagcccaggacagctttgaaagtggcccaacacaaattcataaactttctaaaacatgagattgtttttgcaaatttttaaagctcatcagctattttatgggtgacccaagacaattattcttctagtgtggcccagggaagctaaaagattggacacctcgatctaggagatatgttttgtatttcctatgtccttgattacatttctgacctcgttgatgccattaatttttaaatatttcttcttgtttgatgattaaaaatccaatactgaaaaattaactcaaatgttgaaaaagaacagccatgtttgaagctttaacctagcagttgtaacctaactgaatgtacctcttccaactgtaattttgcagtccacttgaggaaggaatcctttttaggacttacctgaaactatttacttggcagttcctccacaaaatcaggtttatttaaaaatatgcagctttttccaggcatggtggctcatgcctgtaatctcagcactttcagaggctgaggcaggagaatggcttgaaccccggagttcaagaccagcatgggcaacatagtgagaccccatctctacaaaaaaatcaaaaaattagccgggcattgtgtcacgtgcctatagtcccagctacaggctcagtggctgaagtgggaggattgctagagcccaggaggttgaggctgcagttgtgatgttgcactgctctccagcctggggccctgactcagaaataataatcttaaaaatgcaggttttaggatagccattcacttgaaaattctaagttggagagccttttgacaatgtatacccatatttctcttctctttttccctcccccttttaagttgtgaggtataattaacatacaataagctgtacatatttaaagtgttcgatttttaaagttttaatatgtgtatctttgaaaccatcaccacaatcaagatagcaaaaatatccatcattcttcaaagtcacctcatatctcccttttaatctccattctgctcctccccaatccccaagcaaccactgatctgctttctgacactgtatagtttgcattttctacaattctaacaaatggaaactgtacagtatatactttttttcctaacttcttgcagaaagagattcatccttgttgtttgtatagaattaattctttattactgagcattactgtaagtgtgtagatataccataattttttaaaaaaaatccatctgttgatggggatttgagttctcaaacttttggctattataaatgctatgacatgctatgaacacttgtttgtgtacaagtgtttgcatggagatatgtatagtctagaaatatatatatatataccatatataactcgactatatattttatcttggataaatagctaggaattgaataactggatcatatggtaaatatatgtataacttttattgtatttttaatttggtatttttatttatcagagttatagaaatttggaggagtacatgtggtatttcaatacatgtgtacaatgtgtaatgatcaaatcggtgtagttgggatgcccatcaccccaaacattgtgtttaacttttttttgtgtgttttgagacggagtcttgctctgttgcccaggctggagtgcagtggcatgatcttggctcactgcaacatcggcctgcggggttcaagcaattctcctgcctcagcctcctgagtagctgggactacaggcatgtggcaccatgccttgctaattttttatatttttagtagagatggggtttcaccg[136 bp omitted]tgggtgtgctgttttacgttttcaccagcagtgtgcatcttttcttcacattttcatcaaaatatgtaacggtcggtctcttttaattttagccattctaccctagtagtatctcactgtgtttttaatttgcatttttctaaacatgtttttcatgtgctgttttccattatcatatctttggtaaagtctacttaaatactttgcccatttttttattgggttacttgttttcttattgagttttgtgggttctttgtatattattgatacaagtgctttatcaggcatgtgatttccaaaattttttcactcagtctgtggttaagcagaagtttaaaatttttatgaagtctagtttatcataattttctttgatgtatcatgcttttggtgtcatatctaagaaacctttgcctaatccaaggtctcaaagactttctcctatgttttctgctaactttataagtttaggtgtttttttttttttttttttttgagacggagtctcgctctgtcgcccaggctgtagtgcagtggcacgatctcggctcacggcaagctccgcctcccgcgttcacgccattctcctgcctc[222 bp omitted]ataatacttatatataatacaaaacacgtttattcatcttaaaactatggatgtccagttatgccaacaccatttgttgaaaaaatgatcttttctccattgaattgactttgtgtctttgtcaaaaatcaattgaccgtatatgagtgggcctatttctgaactctccattctagctcgttgatctttttgtctcttcaccatacacagccagttgttcttgattactaacatagctttatagtaattctctctaaatcaggtagcacgagtcttccaactttgctttttcaaaattgttttagctattctagttcttttgctttttcatgtaagttgtagaatcatcttgttgattcttttaaagaatatttgcagggcttttaatgggaagtgtgttggaagatttgacttctttagtcttccaatcagtgaaaatggcatgtctcttcacttatttaggtcttttatttcatcagtgatttgtatttttcagtacacagatattgcctgttttcttagacttgtacttaaaaaattcctgaaaattttgttctgttgtaagtttctatttgttcataatagtatatagaaatgcaacttatttatattaacattgtatattaacattgcatcccaggaccttttgaaactgatttattagttctggtaactttttcattctttatacataatcatgttgtatgcaaatggagacagttatttcttgttttccaatatgttttctgtttctttgcttgtttccctaagagctttttctgcatctactaagatgattgaagagtttttgttctttagtctattaatatagtgacttaacattcattttaaaatgttcgaacaacattgcattcctgagataaacctacttaatcatgatgtagtattattttcatatattcgacttgctggtatttgttgaagaattttgtgtctatgtttatgaggaatattgatctgttgtcttcatgcatttttctaattttggtaacaagataatgctagccttataaaatgagttgggaagtgtttttctcctctttattttcttctttttcctcaaaatgtttgtgtagaattggtagtttcttttcccttaaatgtttggtacatataagaggcttaggcctggtggtggtgtttctggaggtgttttaacttgaattcaatctcattaataggtataggaatattcaggatgtctgtttattcttgaataaattttggtagtttttcttttttaaatacattgtctatttcatctaggttgtcacatatggcataaagttgttcataatatttccttattatcattttaatgtcattaggatctggcgtgtgtgtgtgtgtgtgtgtgtgtgtgtgtgtgtgtgtctcccaggctggagtgcagtggcacaatcttgcattcacagcaccctttgcctccggggcaggtttaagtgattctcctgcctcagcctcctgggtagctggtatttttagtagagagggggttttgccatgttggccaggctggtctcaaactcctgacccctgaagtgatccacctgcctcagcctcccaaagtgcagggattacaggcgtgagccactgcacctggcctgtcattaggatctgtaatcatatccttctttcagtcctacaattggtaatttctgttttgttttcttgttcttttcaaagtttattgctttttcttcactattgttatccttttcgtttggttgatttctgctttcatttttgttgttttcttctttcttgcttaggggtttttcttttttcatagacagggtctcactctgttacccaggctagtctcaaactcctgggctcaagcagttctcctgccttggcctcccccaaatcctgggattacaggtgtgaaccattgcacccagcttttttttttaaagtttattaagcttaaaaaagcttagataattgatgtaagttccttttcttccaatataagcatttcatgctctaaatttttctctaaatgctgccttagtggcattctacaagttctgatatgttatctttttatttttatttcttattttcccttttctcttctaactcatggggttttttttgacccatgggttatttaatttctaagggtagtgggggattttcctgagattgttttgttattgattctcatttaattttgttgtgatatgagaatatactttgtgtggtttcaattcttttaaattggtgcagtgaattacatggcccagagtatgatccatcttggtgtatgttttaatgatgttgattaataatgttgttgaggtcttctatatccttactggttttcttttcttttttccatcacggcaagagttcatcatgacttactggttttctatttgttttattgattaatgagaatgaagtctccagctgttaattgtgggttgtttagtctttgtctttatcagttttggctttgtatattttgaagctctgttgttttgtgcatacacatttaattttatgtctttttggtgaaattacctctttattattatttaatgtccctcttatttctggtaataatccttgttttgatgcctactttgtttgcttttaatatcaccactatagcctttttttttttttttttttttttttttttttttttttttgagagggagtcttgctctgtcgcccaggctggagtgcaatggcacgatctcggttcactgcaagctctgcctcccaggttcatgccattctcctgcctcagcctcccaagtagctgggactacaggcgcccgccaccatgcccagctaatttttttctatttttagtagagatggggtttcaccatgttagctaggatggtctcaatctcttaacctcgtgatccgcctgccttggcctcccaaagtgctgggattacaggcttgagccaccgcgcccggcccactgtagccttttattagtgtttgcctaatagtagtatagccactccagctttaatttgattattgttgctttattctccaatctgatgatttgttataattggtatgtttatgtcatttatatatcatttagtaattgatatggtcagatataaatctatttttggttaccttctttgtttcttttccttttgttacacattttttgctaatttttaaatatgatttcatatcgtatccacaattagcttatttttacaggctgaatatcccttacccaaaatgtttgggattaggagtgttcagatttcggattttttcagattgtggaatatttgtattgtagttatcagttgagtatttgcagtctgaacatctgaaatccaaaacactcccatcagcatttcctttgagttgtcatgtaagcactcaaaaaaattcagattttacagcatttggatgttcaggttggggtactcaacctgtacctcttttcattattgttttagcgtttactgtagaatttacaatattcatctatagttaatgacagcctctctttaaataatatatactattttatttattttatttcactaggtttttgggaaacaggtggtgtttggttaatgagattttgaatatatactctttacttatacaactgtacactcccaattccttccttcaaacttttgtccaattgtcaagcatttgtcgttggcatatgctataaagccacagtacattgctattatttttgctttaggagtcaagtgtctttcagagcaattaaaagttaaattcttaactgcttctggaaatcgtcattactttgcaagtttaccaaattttatatagcatcctttctgtttgaagaactttctttaatgtttcttgtactgctggttggctgctactgaattttttcagtttttgtcttaaaaagttttcattatatcttcattttcgagggatgtatttgctgggtatggaattatgtgttgttgtttttttctttctatactctttgtattctggtttgcatagtttctaatgagacatgtcctgtaattctcatctttgattctttgtatgtattgtgtctcctcacccatcccctgcctttggccgccttcaaaattttctctttattttgaatttactgcagtttcaatatgatgtgtctaggtgtgattgtttttatttttattttaaaaatacagatactaccattgaaaatccacagaaatatattcattcacctagaaactcttgtttcttactacattcttcatgtaataaaccaaaggatggaagggtgtatattttagtacattagaaaaagctcatttgcatatacttcttgaatttttcatgtgcacaaagacccactgaaagtatacacgaaaaactaacactggtcgggcgtgatgacttatgcttgtaatcccaacactttgagaggacgaggcagacagatcacttgaggtcaggagttcgagaccagcctgggcaacatggtgaaactccatctctactaaaaatacaaaaatcagccaggcgtggcggtacacatatgtaatcccagctacttgggaggctgaggcaggagaatcgcttgaacccaagaggcagaggttgcaatgagccaggattgtgccattgcactccagcgtgggtgacagagcaagactccatctcaaaaaaaaacaaaccaacaaaaaaaaaacacaaagattacatgtggtacatgggcttttggtataggcaaacaaccttgggtcagaatgggatgagttttcaaggtatattgtttatattattttaattttgtaccatgtaaatatattacctagtatagaaaaaaatttaaagcaaatttccccaaatgcattaatgggccttattttttcctttgcctagtttaattatttgattagagtctcagtattctctcatttataatacatatagacagttacacatccatatcttcatatttacacaattttagaaagtattacatttccctacagcctcactccatgggaagagtattgttaactggccattgtgttttaactcaccactggaaaagaaaaattaaacacacgtttaacaacgcagttttaaaacctaacaaagacccagtccacagaccccatatatgttactggctgctgctcaggatggtattttcatccctgagagattggaatgcttttttattttttgttgtcaatgggttttctcttgcctcattccaatcttactatttttctgcaaagcttgtttccctagtcctgctttcatccagaataaaagttcttaaaagcctatttctatcattaactaactccaggcttcacaatgagaacagtgaaaatatagtttctttttcctgaatcccataattagaactaccttgcagttcatattgtggacttctgttcattttcttctctccagctccagcattagctcatttatccaatcctatgttatccccagttgtctccacctcccctccaccccctagagttacagagacctcatattaccaggtgtttgaactacaggagttattgctacattttgctccccattccagtccaattgtacctgacaatattccaatttcaaatccattaagtataaactgttttaagaatggcaaagtataggctcaaaataaagagatggagaaatatttaccaagcaaatggaaagaaaaataaagcaggggtttcaatcctagtctctgataaaacagactttaacaatgataaaaaaaatacaaagaagggcattacataatggtaaagagatcaatgcaacaagaagagctaactatcctaaatatatatgcacccaatacaggagcacctagattcataaggtaagttcttagagacctacaaggagacttaagactcccacacaataacagtgggatactttatcacccaactgccaatattagacagatcaacaagacagaaaattaacaaggatattcaggacttaaactcagctctggaccaagtggacctaatagacatctacagaactctccatcccaaatcaacagaatatacattcttctcagtgacacatagcatgtattctagaattgaccacataattggaagtaaaacactcctcagcaaatgcaaaagaacagaaatcataacagtctctcaggccacagtgcaatcaaattagaactcaggattaagaaactcactgaaaactgcacaactacatggaaaccgaacaacctgctcctgaatgactactgggtaaataatgaaatttgggcagaaataaataagttattttaaatcattgagaacaaagacacaacgtaccagaatctgtgggtcacagcgaaagcagtgtttagagggaaatttatagcactaaatgccaacaggagatagcaggaaagatctaaaatcgacactctaacatcacaattaaaagaagtagagaagcaagagcaaacaaattcaaaagctagcagaagacaagaaataactaacatcagagcacacctgaaggagatagagacacaaaaaacccttcaaaaaaatcagtgaatgcaggagctggctttttggaaagactaacaaaacagagagaccactagtcagactaataaagaagagaaaagagaagaatcaaatagacacaataaaaaatgataaaggggatatcaccactgatcccacagaaatacagactaccatcagagagtactataaacacctctatgcaaataaactagaaaatttagaagaaatggatacattcctggacacatacaccatcccaagactaaaccaggaataagttgtatccctgaatagaccaataagaaattctgaaattgaggcagtaattaatagcctaccaaccaaaaaaaaagcccaggaccagatggattcacagccaaattctaccaaaggtacaaagaggagctggtaccattccttctgaaactattccaaacaatagaaaaagagggactcctccataactcatttcatgatgctagcatcatcctgataagaaaacctggcagagacaaaacaaaaaaagaaaatttcaggccaatatctttgatgaacatcaatgtgaaaaatcctcaataaaatactggcaaaccgaatccagcagcacatcaaaaaacttaaccaccatgatcaagttggcttcatccctgggatgtaaggctggttcaacatatgcaaatcaataaacataatccattacataaacagaaccgatgacaaaaaccacatgattacctcaataaatgcagaaaaaggccttcaataaaattcaataccccttcttgctaaaaactctcaataagctaggtactgatggaatgtatctcaaaataataagagctatttatgaccaacccatagccaatatcatactgaatgggcaaaagctggaagcattccctttgaacactggcataagacaaggaagacctctcttaccactcctattcaacatagtattagaagttctagccagggcaatcaggcaagagaaagaaataaagtgtattcaaataggaagagaggaagtcaaattgtttctgtttgcagatgacatgactgtgtatttagaaaagcccatcatctcagcctgaaatctccttaagctgataagcaacttcagcaaagtctcaggatacaaaatcagtgtgcaaaaatcacaagcattcctatagaccaataatagacaaacagccaaatcatgagtgaactcccattcacaattactacaaagagaataaagtacctaggaataaaacttacaagggatgtgaaggacctcttcaaggagaactacaaaccactgctcaaggaaataagagaggacacaaacaaatggaaaaacattccatgcccatggataggaagaatcgatatcgtgaaaatggccaccatacctcccaaagtaatgtatagattcaaggctattcccatcaaactgccattgactttcttcacagaattagaaaaaactactttaaatttcatatggaaccaaaaaagagccctatagtcaagacaatcctaagcaaaaagaacaaagctggaggcatcacgctacccgacttcaaactatactacaaggctacagtagccaaaacagcatggtactcataccaaaacagatatacagacaaattgaacagaagagaagcttcagaaataacaccacacatctaaaaccatctgatctttgacaaacctgacaaaaacaagcaatagggaagggattccctatttaataaatggtgttgggaaaactggctagccatatgcagaaaactgaaactggacctcttccttataccttatacaaaaattaactcaagatggattaaagacttaaacataagacctaaaaccatacaaaccttagaagaaaacctaggcaataccattcaggacataggcatgggcaaagacttcatgactaaaacacgaaaagcaatgacaacaaaagcaaaaactgatgaatgggatctaattaaagtgcttctgcacagcaaaagaaactatcatcagagtcaacaggcaacctacagaatgggagaaaaattttggaatctatccatctgacaaagggctaatatccagattctacaaggaacttaaacaaatttactaggaaaaaaaaaaaaactaaccccatcaaaaagtgggcaaaggatatgagcagacacttctcaaaggaagacatttatgcagccaacaaacatatgagaaaaagctcatcgtcactggtcattagagaaatgcaaatcaaaaccacaataagataccatctcatgccagttagaatggtgatcattaaaaagtcaggaaacaacagatactggagagaatgtggagaaataggaatgcttttacactgttggtgggagtgtaaattagttccaccattgtggaagaccgtgtggcaattcctcaaggatctagaaccagaaataccatttgacccagcaatcccattactgggtatatacccaaaggattataaatcatcctactgtaaagagacatgcatacgtatgtttattgcagcactattcacaatagagaagacttggaagcaacccaaatgcccatcaatgatagactgaataaagaacatatggcacatatacaccatggaatactatgcagccataaaaaggattaattcatgtcctttgcagggacatggatgaagctggaaaccatcattcttagcaaactaactctggaacagaaaaccaaacaccacatgttcacactcataagtgggagttgaagaatgagaacacatggacacggggaggggaacatcacacactggggccttttgagggttgaggtgctaggggagggatagcattagaagaaatacctaatgtagatgacgggttgatgggtgcagcacaccaccatggcatgtgtatacctacgtaacctgcacattctgcacatgtatcccagaacttacagtattaaaaaaaaaaaaaaagagtggcaaagtaatgtcagagaaatgatggagtaggtagcttcaacggcccatccttccacagaaacaaaacaacaaaaatgatttttaaaaaactgtcagaatcaatgtcatcagaactctgaaaagtagtccaaggtttacagcaacccagggaatgtagaatagagaaaacagcaacttaaaaatagtaggggagctttgtggtgctttcacttgcccttgatttacttttctctgcagctgggtgatggtcttgaaggtgacagcctatattaccagtgtaggacactgatctcttgctccagaggcagtggagcagaacttgttctcaattgtgtttgtctgttttgaactgtctgagggctacctgaaagactgttgcaagttacttggttttatcttatctaacttggaattctatcatggtggaaaagtggctaattgaagagtacattcctctaaatcattgaaaggcaaatgaacaacccactgtcacttgaggtaagagattactgttgaagcaaacaatatacagaatgacaacttgggaggaaaatctggggagagagattctgtgaggaagtagggtattgaaaagctccccacatacaccaggaaatttagaaaggcatgcacatactcagaggagaacatatgttcagaaatgacctgaaaaaactgcaagctttcacctctgactgatctttgacttagtgcaagcagtaagggaaggctttggcagagttgtaaatgacctggctaagcaccgaaagagggctccaacaaagagtcattgcgcaaagagtgggcaaatatttttccttttttgtttgtttttcatccagacattcaaggaaatccctgttaacacactgggtaaaaataaatgaaaagaatagaggccttagataccacacaatacagggaataccagttttacaaaaaaagtagtttagaaaactcactattcatttcccagagctgctcttaccacatggcacaaaattgggtggcttgaacaacaaaaattcattctctcccagttttctccaggttagacctccaaaatcaaagtgtcagaagggccatgctctctttcattaccacttagtagcttctgctggtatccattgatctttgatattccttggcttttagctgtatcacttcaagctctgtctctgtggtcacatggcattctccccatgtgtttcagtcttaatatggtatgttactcttctaataaggacactgtcgtatcgaatgagggtacaccctaatgccctcatcttgattgcatcttcaaaaaccctatttcaaagtaaggtcatgttcacaggttaggacttcaacatatctttttgggagacaaaattaaacctgtaacagtcactaaacaaaccattacgatccacaataagataagaacaaactgagcaggaggaagaatctgactttaagagataccacattataaaacaaacaaaaaaaaagtacacagcatgcaaataaaaaattatggtccattcccagaataaatgaacagaaactgtccccaaggaaacacagacactggacttaccagacaaagactttaaataaactgtcttaaatattctcaaagaactagaggaaaccatgaacaaaaataataaaccaggagaatcatgtctgaaaaaaagatatcaaataggtagaaattatttaaaaaccatgaattttggacctgaagagtataataactgaaatgaaaattcactagaggatttcaacagtatatttaagcaagcagaaaaatcagtgaactaaaggataagtaaattgaagttattccatctgaggagcagaagaaaaagtaagtagaactcagatacctgtgggatgccatcaagcatatcagcatatgcacaatgggagtcacaataagaggagagagaaaggagtataaggaatatttgaagaaataatgttcaaaaacttctcaaacttataagacatgaatctacacatagaagaagctcaaggaactaactccaagaagaataaatgcatagagatccacaccaagacacattataatcaaaccataaaaagacagagactcaaaatcaacaagagaaagtgacacctcatgttcaaagcctctataataagattaataacccatttctcatcagaaaccatgatctccagaagccagtatgatgacatatttaaagtaatgaaataaaaaaaacctgttagccaagaatcctatatctggcaaaaccatccttcaaaaatgaaggagaaattaagacattcctagataaacaaacactgagggagttcattgctagttggcctgccctacaagaaatacaaaatacttcaggcagaagtgaaaaaacactaaatcttgaagccatataaattaataaagaacactggtaaagtaattacataggtaaacacaaaagccaatattattgtattattggctcataactcctatatgatttaaagaaaaatgagtaaaatagttacaaatctatgttaatggggcacacaatgtataaagatgtaatttttcaaatcctaaagggaggaggacagagatacgggagcaggattttttatattttggaagctaggttagtattaattcaagctatattaacttctttaatgtattacaatatagtttgaattaatactattcaacacttttgcatctttaaattttttcataataaaatttggaaaaataggccagctgtggtagctcacatctgttatcccagcactttgggagggtgaggcaggaggattgcttgaggccaggagtttgagaacagcctgggcaacatagtgagaccctgtctctacaattttttttttaattagctgggtgtgatggcacatttttgtagtcctaactatgcaggagtctgaggctggaggaccacttgagcccaggaatttgaggctgcagtgagccaagatcacacccattgcactccagccggggtgacagagtaagaccttgtttcaaaaaagaaaaaaagacgttaactgtataccacagggtaatcactaagaaaatatacagaaaagggaataagaagaaaaattaaatggtacactacaggtcgggcatggtgactcacgcttgtaatcccagcattttgggaggccaaggtgggtggatcactttaggtcaggagttcaagaccaggctgcccaacatggtgaaactctgtctttactaaaaatacaaaaattcgctgggcattgtggtgcatgcctgtagtcccagctacttgggaggctgaggcatgagaatcacttgaacccaggaggcagaggttgcagtgagctgagatcacaccactgcactccagcctgggtgacagagtgagaccctgtctcaaaatggaaaaaaaaagaaaaaggtacgctgcaaaaacatcaaacagaaaagaaggcattaatcaagagacctaggaaagaaggcattaatcaagagacctaggaacaaaaaagataagccatgtagaaaacagatcacaaagtgaaagaagcaaggccgttttaaaatcaggaattaatttaaatgcaaatagattaagctctccagttaaaaggcaaaaatggacagaatggataaaacagcatgatccaactatatgctgtctataagagacttatttgcaatccaaagacaaaaaatgttgagtgaaaaaatggaagaaaattattccatgcaggatgtaaaaaaagagaactgaagtaattgtattaatattagacaaaatcgacttaggtaaaaaacttgacaagagacaaacaatgacattatatattgacaaaagagtcaatccatcaagaagatataacaatacagacattacacagctagtccccaaatatatggtgtgaaaattgatggaactgaagggagacataaatatttctacaatgttttcagacttcagtatctcactttcaataatggatacaacaaccagacaaaagatcaataaagaattagaggatttggaaacataaaccaaactcctagcagatatatacaaagcaccccacctaaaaccagcagaatacatatttttcttaagtggtcatgaaacattttctgggatagatcatacattaggccacaaaacaggtctcaataaaaataaaaaatctcacgtatcaacagaaagataaagtcacatgaaatgtattctcaggccacaaaaaaatgaaactcaaatcagtaatgaggaaaactggaaaattcacaaatgtgtggaaattaaacagcacactcataaaaaccgatggggatagaagttacagggaaattagaaaatactttgagatgaaaacaaaacatgattcaggattcctttggtgctaaaataataaaattctgctgactgagctaaaaaaatttgtgatagaaaatatcaaaggcagttccccactctatacacaatacccacccccataacttaaataaaacaactttctcctttctagagaaaatcacattggaaacaaagcctctgcaagaagtcctgatatatgtgcttttacaaggctgctaaatattacttcatttttgataccacattgacttgatctattgatgatcattctattgcatttatcatctcaagagcaagctgagtggatacaaaaaaaaatttaaattgaaataagggaagaagcattttcaagatataatttagatgttgtttttttccaaattacaatacagttggctcttgaacaacacaggtttaaactgcatgggtccacttatatgtgaattttttttcaacaaatatattgcaattttttttggaaatttgcaacaatttgaaaaagctcacagataagccgtgtagtctagaaatatcaaacaattaagaaaaatttaggtatatcatgaatgcataaaatatatgtagatattagtctattttatcatttactaccataaaatatacatgaatctattaaaaaaaggtaaaacttataaaaacttacacacacaaacacagactgtacgttcacagtcaagagaaatgtaaaacaaagatgcaatattaaatcaagcctgcataaagttaactgtagtacatgctgtgctactgtaataatttaatagctatctcctgtcactgttgtggtgagctcatgtgtgtaaatatctgcttaaaattccaagtaatgctaatcatctcaaagtgagcagttcatctctctagtaaattgcgtattacagtaaaaagtgatctaaaggtttcttattttttattgtgtttagtgcaatactataaaacttgaatactaccatgggacctatgtgaactgccactagtgatgttgcaagtgctcccaagatgcatagaaaagtcatgacattataagaaaaagttgaattgcttgatatgtactgtagaatgaggtctgaagctgcagctgcctgccatttcagaaagatggtttattttgtaaacagatggtgtaaacttacagtatcaataccgtacagaactgtaaatatttctcttcttcttgattttctttttttcttttttcttttttttttggagctggagtctcactgtcgcctaggctggagtgcagtggcacgatattggctcactgcaacctctgcctcctgggttcaagcaattctcctgcctc[221 bp omitted]ttccgctcgggcattctgggaagtgtagtgcagaagccgttgcaaccttgtgtacttccgctgcaggagggcgaagcagccgtcatctatcccctctgggaggtgagtcagcgcggaacctctgcatctacggcgagctttcctggcctgggcgttggactcgcaggtgcctgccctcgctctcagtgaagggaagtcgcagagggcggggacgacggtttgcttgccctttgtttttagggcggtgcatgggtctccaagttgggaatggctcctggtcgcacgtttggtttgaaggtctcccgggcgctcaagttccctcgccttccccaccttccacacgctctgctgtcttctggcaatataatcttggtagtttcttaatttctccgtttctcctctgtaaagtgagtttcatagtagtacctaactggtaggggtttcgtgagatttacttaagataaatagatgtaaaaatgcgtaggaccgatcctgacacacactgaaaaggtggctggttgttgccaatctgttatttcttcctggagaggagaggcattcagtctctgaaagcttctgtgagcccgcagtgggttctgagctccaggtgcagcgctactcgcccttctctgatctctgcacctcgcgaggctgttcctggattcctaacgtggggggacgggggtgtcaattttctctccatcttttttatttttccttcccttttaaggcatgagtgtgtctcacctccatgtggtgcctggggatgtccactgtcattcatcctggaccagaaacagagtttagatatcttccaacctcctttccttcctcagccttgactaaccggagggctgcagagaggagggtgttgaccccctggctcttggtaacattgtcccaacgtgagaggacttaatatatgctattgctatttctgcttagttggagaacagatttcccacactcattagcaatattatttttcctgctgggcaaatgctcaaatatttatggaataaatgagaggttggattaggcatgtgttcgtgaatgagtaataataaaatttgttaatacgttgagtgccagggtctcttctataggctttatatgcattaattagcttaatcttcagaacaaagataatattgtaattcctgttttacagatgacaacactgatgggtaaaacatttatcttcccaaagtaaaacaacaggaaagagcctgaactgggagtttgagctcaggctgagctcaggcagagtgggttcttgacctttgtgccactctccttcagccctgagaaatgtcagtcccatgggggtgcagtgactcacgcctgtaatcccacactttggaaggctgaggcgggaggatggcttgagcccaggagttcaacagcagcctgggcaacatagtgagactccatctctacaaaaaaattaaaaattagccacacacctgtggtcccagctacttgggaggctgaggcaggaggatcgcttgagcccaggaggcagaggttgcagtgagctgagatcatcccactgcactccagcctgggcaagagagtgagagtctgtctcaaaaaaattaaaaagaggaaaagaaatggtttcacagtttaggcaatgactgggggatgctcaagagtcataataaaaaaaatttttttaaggatttgcagggaagaactctgaggagatgacatttgagtaaatacctgacactgctattaaaataaataaatagatagggtttacattatccacagtctatggattgacccttttatgaatgatttcactttttttttttttttttttttgagactgagtctccctctgtctcccaggctggagtgcagtggcacgatctcagctcactgcaacctcccactcccaggttcaagtgattctcgtgcctcagcctcccgagtagctgggattacagatgcccgccaccatgcctggctaatttttgtatttttaggagagatgaggtttcatcatgttggccaggctggtctcgaactcgtgacctcaagtgatctgcctgccttgacctcctaaagtgctgggattacaggcgtgagccactgcgcctggcctaatgatttcacttttaaggatgaccttgatgttgcttgagcaaagcaaatgaaattaaaaacgcagaagaaattgacatataaagttcatcctctcctcctcccaattaatttaatagcctgagaattttgtagcttaaaggaatcttggagatcaattagtacaatccttgtctgactgtgtgtcattctttgattctgtgtgcatcaaatactcactatattctaggtgcttggggtaaaaagatgagtaatgttcattatctcacaggcaaaacagatgcttgatttactaattataccccaaatgccccagctacgctgaaggcttccaagaggagggattacaagagaaggacagggaagctggtcctctctggaggcagagtggcaggagcaaaggcacgagaggacttgacaacctaggaatgaacaaagtctggaaattcaggcctcgaaaagtggccctggtacatgtagtgagcagagctgagccaggcaccccaaaccccatttgtttttttctactaaatgtcgtgaaatgtcaagtcttgcaaaatcctgttactgagcagagcaggagggtgcaggtaaatataggaccagaacaaagggaattggatattaaaaattgatctctctccctagctttcagaagagaatacattgctctcgtccctactagagtgtttctgcctgaagtaggaggacccacgaacaggagtagctatctgtattgaatgctatcttgtatatactcactgaaacctcttaataaccctacgaggtagatactgttattgtcctcactttatgggtgaggaaataggcacaaagagctagtaagtcagaagagtcaattaggatattaggttcctcatcatctggctccagtatccctcagcagatcattttcagcagttcataccctccaacttccccttctctgatctctaagacatgattccttccatgtcttcatatttctgattagagaaggagacacgattaagagacaggctctggactcagctggattcagatgcagtctcacctcaccagctctgtgaccttgggcaacttaatctcagtaatcctcagcttcctcatccattaaatgggaacgacagtcatcatatcatcacttattgagagcttatataatgtgccacagacagaaccaaggcttttaccccatttaaaaaattgagtcataattcatataccatataattcacccttttaaagtgtgcaattcggtggtatttagtgtatccacaatgttaggttgtacaaccatcactattttctaattgaagaacatttgtatcacccccaaaagaaacctcatatgccctagccatcactctttactatctcttctctcagcccctggcaactattactttttgtctctatggtttagcctagccaagactattcgatttgctcattaatccccaaagcaactgtaaattagaatctgttattagtactacagtatttttcatttaagtgagacagatactgtcaaacttttgtttaaaaaaaagctagcagagacacattttaaattagtatttccttacgacagtgagcacgggaaagggagatacaccattgagactctcctggctacatgaagaaaattcataagtatttataccttttacaaaactgaatgctgatatcaattaaatattataggacaacaaagtagtaagtaatatagccaatcagaattatagacttttcagaggtaaaggtgaatttcataagataaagcattgtacagtctttgaaatctggatgttataaaagactctcttattggaaatgatggcaaaagacatttgcaacaacaattttatgatgcataatatcatctgcttttctgcagcttgcagggaaatcagttatacgagtttccatctgttcacacatttaacccttacaataatcttgcaagaaagcactatttttctcatttgcaggtgacaaatttgaggaatggggaggttaattagcttaaacagagttagtagccatgccaggatttgaccccagaccttgtgaccccagaatccacttttgtagccagtacattctgctgcaagtagctgggattacaggtgtgtgccaccacacccagctaattattgtatttttttgtagagatggggtt[133 bp omitted]gtgggctagggcctgtttctcatggcttctttctcttttcccagttctgccttcccaggaccctgcccttccccagaaggagcaggagaaaatgaccaagtttcaggtgagttgagttttgatttttatctcttaaaatgacatctcttttcctcaaagattagacacttttttttctcttccttgggaaagataaaggaggaaaacaggtatttggaatctgctagttacttgattttcgattggttcaattttttgtttatgtctttagcttttgttttggtagttttattttatcatctttatttcacaagtagtagtgcaaaaattcgtagatatcaaaaaatgggagaaaacctccacattactacattgcatacaaataatctatttcccccatactattttatatgtatttacatattgtatgtcttatatctatacttgtcagtgtattttaaagaactacaatcacattctatatacaattttcttttttcagttaatgttgttactagagttttatatgatttagtgttcctttatgtatttgtctcagaagggttttcattttttgtctaatttttcagaggctacaaaacaaacacacaatgctgtctctaaatagtatttcaatttgcaagactttttcatggggctttaaaaatgcaatatttacttacaaaaattatatatatcttaagtggtcaggtcaataacagttttatatcccacttcgacagttgtataattgcattagcccaccattcagaacaagatatagaacatttatattaccccaaaaaggtccctcctgtctctttcaagtcagttccttactccccagaggcatcctctgttatcccttacccccttctcaccctttccccctgaggccctaaagtccattgtgtcattcttagacctttggatcctcatagcttagctcctacttatgagagagaacatacgatgtttggttttccattcctgagttacttcacagagaataatagtctccaatatcatccagcttgctgcaaatgccattaattcgttcctttttatggctgagtagtattccatcatatatatatacacacacacacacacacacacacacacacacacacacacacaccacggtttcttttcttttgtttttttttgagacggagtcttgcactgttgcccaggctggagtgcaatggcgcgatcctggctcactgcaacctccgcctcccaggttcaagcaattctcctgcctcagcctcccgagtagctgggattataggcacctgccaacatacccagctaattttttgtgtttttagtagagacggtgttt[141 bp omitted]gggttggttccacatttttgcaattgcaaattgtgctactataaacgtgcatgtacaaacacctttttcagcgttgggactaaattgacccaacatttctaggacaatttggtagtatcagtcaagttataaaatacgtattccgtgtgattcaagatttacagtgctggggcatttactgttggaatacttacaaatgtcaccaaattaaatacacaggggttattttttagtagcacacacttttgatgtgactgtggaaaagtagtctatgagattggcatgtgggatggagaaaacgaggaagctacttaaagttcattcgaggccctcacaatccagaacgtcttcctgcctgttctttctacctgctcagtgctgcctctctcccagcagttattggccataagattgagattacatctgcttgatgttgtaggagatggtgacattcaaggatgtggctgtggtcttcaccagggaggagctggggttgctggaccttgcccagagaaagctgtaccaagatgtgatgctggagaacttcaggaacctgctgtcagtgggtgagcacaggcaccttctgtaactgaatatcagccctctggactgtcctgctttcaattatttaagactttgggacgcttaaaatgcttccctgaacttggggatgtgaattttctaattcctcagggacatcttgtctataccttgtctatttttctcaaattgcagttgtgaaatcttggtgggttttgaaatcagttggtgagttacattattattgtgtttaatgaaatgaagtagaaatattatagctccttgtcaggaactgcattcagtgcaacgaaaattgtaagtaaaaacaggaaagaagatgtgataaaagtagataatggttaggatcaaattatctgatcacttgatttcagtgatttacatttatgtatttgtgtaccggatcacaaattaaaaggtattcagacaatagctcatgatcacaattttgaaaaatactacttagagcgcatgaaaatggtggtgttggaattaaaatttttgactataatgcattcactttatatatatgccatttctttttcacaggctatcaacccttcaaactagatgtgatattacagttgggaaaagaagacaagcttcggatgatggagacagaaatccaaggagatgggtgttcaggtgagaaccatggagctctgagtctttgcggggtacagcctagtcctctcctcctcaccacctcctcagccaccagcctggcccaagaccccagaattcatcgccctggtttactgcagcagcttgcacatgaccttcctccttctacctccctccagtccattctccacatagccagatcatgtaagtcagatcatgtcgctccttggctcaaaagccttctgtgacttcccatctcactcattaattccaaaatctctacgagccttcagggtcctatgtgacctggtcacccactccctgtgaattgatttcctatcctttgcttttcactcagttctttccagccacacaagactgctgtgtgtttcttatacatgccaagggtgctttttttttttttttttctttaagacaggtctcactctgtgacctaggctgaagtggtggtgcaatcatggtacactgcagcctcgacctcccaggctcaatcgatcttctcacctcagcctcctgagtagctgggatgggactacaggcacttgccactatgctggactaattttaaaactatgtatatatacatgtttttttttttttggtagagatgaggtctcaccatattacccaggttggtctcaaactcctgagctcaagcaatcctcccacttcagcctcccaaagtgttaggattacaggcatgagccactgtgcccggcatacatgtatttctttctacctgaagccttttgctcttctgtctgcctgggatgttcttacctcatacatcctcttggctcccagcctacttcctttatgtctggtcagatgtcatctcatcacagaaacctgcttttttttttcttttagacggagtcttgctctgtcgccaggctggagtgctatggcgcgatcttggctcactgcaacctctgactccctggaaaactgctttgactaccctgtttaaaatacctatccttggctgggcgtgatggctcatccctgtaatctcagcactttgagaggccaaggtggcaggatcactcgaggccaggagtttaagaccagcctggacaacacagtgagaccgcacctctataaaaaaatttaaaaaattagctcacagctataactgtgccactgcactgtagcctgggcgacagagcaagaccctgtctcaaaaatacatacatacatacatacatacatacatacatacatttaattaaattaaatacccatctctttattctgcctttgtgattaatcatcaatcatcagctgacatattcatgtattacattttgtttacttttctatggtctctttccccattagagtacaacttcatgaacgtaagaattttacctgttttcttttcatttttctttttcttttcttagagatgggggtctggctttttcacctaggctggagtgcagtgatacaatcatagcttgctgcagctcaaactcctgggctgggactacaggagtgcactactgtgcccaacactaatattacctgttttaaaattgctgatccttattgcctttaataggcttggcacgtaatacctgttcatttaatatttgtcgaatgagtgactgaatgagtgaatgaatgggttaatggaccgatgtcagtaacgtcagttaatggactaatggataggtgttttcatttgaatagtactgtaatggctccctcacagatctcccaacctgtggtatctgcgagacttttggtgagagttgcctcatccatacacccagtgacaacctccctgttctgctttcacccctctccttctattctttctcttccttatttcattcccccttttcttcacttcttccttcatttatctttaatttgaatatacatcataaatacctaaaatacactaattaaagtcattcctacttgatagaagcaccaaaacgcaaaaactaaattaaacaaacaaaaaaagcaaaccaaaagcccaggagaatctctctgcttatctgagagagacaggccctggattttgtaagtagctggagtagtaaaatctttccaatcttcttatcttttattttcttgtatctccatgctccatgaacgttgactgcattgcaatcaggaatgttggatgctgacttctttgactgactgcctcatttttaaaaattttctttttttgtttttgactgcctcatttttgtgtataaacctaaaacttgggaattatgatcccagttattgccattgtcctttttttttttcttaacaggtagcttcttcccaacttcttctttgcctccttagcaaatcttgactgtttttgttttttttttctttttttgagatggagtctcgctctgttgccaggctagagtgcagtggcgcaatcttggctggctgcaacctctgcctctcaggttcaagcgattctcctgcctcagcctcccgagtagcagggactataggcgcatgccaccacacccagctaatttttgtatttttagtagagatggggtttcaccatgttggccaggatggtctctatctcttgaccttgtgatctgcccacgttggcctcccaaagtgctgggattacaggcatgagccactgctcccggccacaaatctttactttttttttaatttttggccaattttttattgaaatatatacagaaaactgtacaaattgtaaatgtatagctccctaaattttcaggaagtaaaatggcttgttttacagctcttttttattgaggtaaaatttacatgtgcacaccttaagtgtgcaatttgatgagttttgacaaaaggatataactatgtaactcacagcccttggaaaactgaacaaatctgacagcgtattctaccctcacctctctttattttttggcaaacatcagaattttttagggtttcacattctgcttatccacctacgtacccagctccacctatacaaaatattcctgaggtctattttcactggacagaagtacaaattaaagggcatcttctccctcaaggatcaatgaaacaaaatctcacagagtatggtgctaagtggatctcactgtcttcacttctcattgagagagttcacaggcagagaataaagaggtgtcactaaaggactatttcagaacatagttactcttctgatgttatgttcagcctacttataatttttatgacacctgtgttagttat[137 bp omitted]catggtgaaaccccatctatactaaaaaaaaaaaaaaaaaaaaaaaaattagccaggtgtggtggcaggcaactgtaatcccaactactggggaggctgaggcaggagaatcacttgaaccccggaggcagaggttgcaatgagctgatatcataccattgcactccagcctggggaacaagagcggaacttcgtctcaaaacaaaacaaaaaccttagcaccttaaaacaatgaacattggtttatagtttctatgggttaggtatatgggagcagcttagcttaaccctaagtgagggttctcactccggatctcaaaaagctgttaaagagtgacggagctgccgtccccggaaggctggactgggactgaaggacctgcttccaaggtgggctcgttcacatggctgtggcaggaggcctcgcttccttgctaagtgaaccattccctacggctgctgaagtgtcctcaaaacatggcagctagtttctcccagacccagtgattcaggagagtggaagatagaagccacagtgtttttatgacctagcatcagaagtgacagatcatcacttctgccatattctattggtttcacagaccaaacttgatacagtgtgggagggggcttcaaaagggaatggattccaatggggagtgatcactggggaccatcttgtattagccatttaggtttatcagaaaattcagtcaaaccaagtggcaacaattatcaatgcctttactcctatagggtgtgtcagctatgggaataagttttctaattctttttcatttatcatgttcactaattgaatattatatacttagaacctcattgaaaagaaggagaattctctcaaatctagctcatcaaatgtatgtttaaggactaaattaaggaaataatggtactatcttatgggttcattctcaagacagagaagatatttttctatattctcttcacttttgccaaggatgtcccctctttctttctttgagaattcttggcatcactaaataatccacttgtgaatgctgaaggagagattcaggcttttgtaaccatttttgggctttatcatatacagatgcaggttgtacaatgtaaccatgattctgaggctcacatatagccaggattttgtagattttatacatctgccacggaaaagaggagaggatttttttttttttttgagacggagtctcactctgtagcccaggcttgagtgcagtggcacgatctccgctcactgcaagctctgcctcctgggttcacaccattctcctgccttggcctcccgagtagccgggactacaggcgcctgccccc[141 bp omitted]agccaaagaggagggatttttaagtgattattcttatggacaaggaggtaaagtttctcctctacaacgtctttctagggcatctttttgttgctctgtagcctgtgtatttgaccacatacataagtcttggtattggccaggcatggtggctcacacctgtaatcccagcactttgggaggccaaggcaggcagatgacttgaggtcaggagttcaagaccagcctggccaacatggtgaaaccctgtctctactaaaaatacaaaaaaaattaatgaggtgtggtggcatgcacttgtagtcccagctcctccagaggctgaggcaggagaatcacttgaaccccagaggtggaggtttcagtaagccaagatcgtgccaccacactccagcctgggcaagagagtgagactccatctcaaaaaaaaaaaaaaaatcctctcctcttttccatggcagatgtataaaatctacaaaatcctggctatatgtgagcctcagaatcatggttacattgtacaacctgcagtctcaaaaaaaaaaaaaaaaaaaagtcttggtatagctctaaatgagtctcattaacattttgtatatagaagccagccttttttgt[174 bp omitted]ggtggcaggcgcctgtagtcccagctactcgggaggccgaggcaggagaatggaatgaacccgggaggtggagcttgcagtgagccaagagcacaccactgcactccagcctgggtgacagagcgagactccgtctcaaaaaacaaaaaaagagaaaaaaaaacaatgataaagtcaagctgaactctccactggtttattaaggtttcccaatgtggtcaacctgtgaaatgtttttttatttctgaacaaatgttcagttgtcttcattttcatttctgagttctctttatcattctaggacacaagaatcaaaatgagatagatacccttcaagaagtaagattaagattcctttcatatgaagaccttatatgctggcaaatatgggaacaatttacaagtaaattaaccagtaatcaagacctaataataaatcttcaaggcaagaggtccaagttgctaaaacaaggtgattccccctgtcaggtgtggacaggagaatctagtcaggtctctgaagatgagaactatgtaataaagctacaaggggagagttcaaatagcataaaaaatcaagagcttccattgaggaccacctgggatttctggaggaaaatgtatctgagagaaccacagaattatcagagtaggtgtcagcaaattgatgtaaaaaataagctctgtaaatgtgatcattgtgttaggcaaagaattgctcatcaacatgatgatcatggagtacacaaaagagagaaagcttttagccacaataattgtggaaaagactgtgtgaaggaatcatcccagcatagcataatccaatcaggagagcaaacctctgatgaaaatggaaaaggcttaagtgttggctctaatcttgaacttcaccagcaactacacttaagagacaagcctcatgtaaatgttgagtacgggaagggcataggttacagctcagggcttcccaggcatcagtgtttccacataggagagaaatgctataggaatggtgacagtggtgagggcttcagtcagggctcacatctgcaacctcatcagagagtcagcacaggagagaacctctacagatgtcaggtatatgcccggagctccaaccagaactcctgtcttccctctcatgagcttactcacccaggagagaagttgtgtacatgtggcaggtgtgggaagggcttccatcatagcttagattttgacattcactgtgtagacagtgctggagagagagcctgtaaatgtgatgtatatgataaaggcttcagtcagacatcacaacttcaagcccatcagagaggtcactctagagacaagacatacaaatgggaagtaagtgacaggatatttaataggaattctggtcttcaccagagagttcacactggagagaaaccatataaatgtgaggtatgtgataagggcttcagtaaggcctcaaatcttcaagcccatcagagaatccacactggagagaaaccctacaaatgtgatgtgtgtgataagaacttcagccgtaattcccaccttcaggcccatcagagagtccatacaggagagaaaccctacaaatgtgacacatgtgggaaggacttcagtcagatctctcatcttcaggcccatcagagagttcacaaaggagagaagccatacaaatgtgagacatgtgggaagggctttagtcagagttcgcatctccaagaccatcagcaagtccatactggagagaatccctacaaatgtgatgtgtgtgggaaaggcttcagttggagttcacatcttcaagcccatcagagagtccacacaggagagaaaccatacaaatgtgaagaatgtaggaaaggcttcatctggaactcatatcttcatgttcatcagaggatccacacgggagagaaaccctataaatgtggcatgtgtggtaagagcttcagtcagacttcacatcttcaagcccatcagagagtccatactggagagaaaccatacaaatgttttgtgtgtggtaagggctttagtaagagttcgttgtcttcagattcatcagagagtccatgatggtgatgaatctattaatcatgatgagtgtgataggggtgctcttcaagacttagacttcccattttcctcagaaaatccacacagcacagaatatttataaaatgtcatgttttaagaattcatgagctgagtttttatagttatctgaattccattgaagaaaacctatttttgtatgaatatgaccagtttcaagcagagcccaaaatgtcacagttgtcaagagaacacacaacagagaaaccctataaagaatgatacaatatgtttcaatcagaaccttcacatccaataagcaatatgcaggagtgaagccttcaaaatgataagtaaggtcagaatttagcaaaagtataatgagggacatgacaaaatctgtgtccactagaatctaagctccatgcaggaacattgtttactgctgcatgatcgtgaccttgaacaagtacctaagaaatagtggcttccctggaattgtttaacttgataggaaaaatctatcatatataggacatatatttgaatattttagtgagctcagccccaattcgtcattataattgtactgggaaaaggattcttgcaagaagccttaaaatgaattcaaggaaatgacatttaattaaaacacataaaaccaagcagtctacaatctgagtaatgtttttgcaattggcttctgtcctcagttcagcttcattttccaagcagtataataggccaaagtttctatctgattatttaagactttttccatacagtgtacagctgtgctatgtttctttggcgggggcttttgctatctttctttttgggagctagtgtgatagaaacagactgaatgaagaaaaaaatcccaactggtttttagttccataaagcttcatgagaaaggttttgcaaaaaaggggaatatcatatggcatgcattttagatgttaaactaagctgttaaggacacagcattttggacaacaccccatacttctcagacatcattacacgttatgcagtgtgtaatgatcaaatcatagtaattggatgaagggtttactcaggtgtatatttagtggaggtgggagaaagtttcccactgttgtttttttttttttgtcctggaccttaccttccaggacaatgaatacttaagttccatgatacctcatttcatgctaccatcagaaatacagggccaataaatgaaaaagaaaaaataaataaaaaagataaaaacaaaaaaagaaatacagggccaataatgctttgcttcatcaccaccagattactagggtgggctgctggagcacatggttgtttaaatcaagatgttttcaattgtgagaaatggaaaatcacactccaactagctggaacaaa[136 bp omitted]cagcctctactaaaaatacaaaaattagtcgggtgtggtagtggtgcctgtaatcccagctactcaagagtctgaagcaggagaatcgcttgaacccgggaggcggaggttgccatgagccaagatggcgccattgccctccagcccagggggccggtatgagactccatctcaaacaagacaaaacaaaaaacaaaaagaatacaggtaggacaggaccaggtctcgttgaaacagggctctgggtcaattcttctgtgattccctcacctctgcccttctggttgagttgattcccacatttgttcattccaacctactgaggaaatttacttaaagaatagatgctcagttaacattctcatatcacacactcccttttctgtgcacttctaaagcagttattttcggaacctctttttgctcttaatcatgtagagacttttcattttcctaaatatatcatacctaaacaaataactcatagaggtactgtgggttatggtttgccatttgaaccatgcatcaaccttctggagaatcttttaaagtatatacatttttccagagtaaaattaatttttttctaaaacacgtgaagtagtttttattaatatattaatagttgtatatatttatgggatgcacgtgatattttgatttgtgcacatacaatgtgtaatgatcaaatcatggtaattgggatatgcatcacctcaaacatttatcatttctttgtgttgggaacattctaaatcttctagttattttgaaatatacaacaaattcttgttaactgtagttgccctactgtgttattgattagctataataaataagttctagtgttactgacactgttctatctgatcatatttttgtacccattaaccaacctctcttcatccttccctcacccctatccatcccaacctctgataaccaccattctaaatcacttcctccttgagatcaatatttttagttcctatataggaatgagaatatgcaaaatgtgtctttctatgcctggatgattccacttaacacaatatcctctggttccatccatgttgctgcaaatgacaggagaaagaaaatgtggtatatacacacaatggaatattatccagccattaaaataataaaatcctgtcatttgcagcaagagattgtctgatttttgtttgttttttatttatttatttatttttttgagacaggtctcagttgaccaggctggagtgcagtggcacaatcctagttcactgtagtcccaacctgccagactcaagcaatcttcccacctcagcttcctgagtactagggactacaggcatgcaccaacatgcccagccaattttttgtaaagatggtctcaccatgttgcccagattagtctcaaactcctgagctcaagctattttcctgcctcgacatcccaaagtgctgggattacaggcatgagccactgcacctggcctgaataaagaattttatctatatatacttggtctaaacagaaaaagacctgcaaagaaatcatgaacactaacaaagtttgttatgtgcattcatgttagttggcaactccaaaactacttgccaggtattggaggactgaacagatgcataaacatactgatgatgctgggggccaatttctgactcttggagaaagaagtaaatatggaatgggaaaatcccttaggaagaatcctgcaatacttatttaaaatgagaggggtcagtattttacacagacacagacacacacacacacacacacacacacacacgactattatcccaataatgattagtatgcacagcacccagatcttggtttctaagtatcattccccactaaaagcaatcagagctctacagaatctgtggctgaggcagggaatatacaagataaacctaatatcttactgtaccagaaaacaaaggttcatatggatgacagacaggtagagagacatgggggtaggggaaggaaaagctcttctaacaaacagtaggatgccaattactaaaaataaaaggaatgacggagtcagaaagtcatattttgcagtcatcacagtaataactgattcagacaagaatcatcaatgaacactaaaactagtgggtgaaagacgagatgataacatagtctcaaagatcttcccacaaattgcttattaatttcaaagccaaaatagcaattttttagtggaaaaacctaggagacaccagttcacacaagttatcaacgctaacgccaacaaaacacatcatgtgtttcctattgtgatgcactgacaagtatgcattagtcatgcaatactcaatctacaaacatttaacttgaatctaatcatgaggagtcaaactcaaatttagggttgttctacaaaatagcttgttgtcttcaaaatgctcatttcatgaaagacaaaaaatggctatggaactgatccaggttgaagactaaagaaacatgacaatgaaatgcaggcatgatacattttagattggaccctgaactagaaaatgctataaacattataggacaactgtggaatttaaataaactctgcagattaggaaacattactgtttctttttctttttttttttgagatggagtcttgctctgtcgcccaggctggagtgcagtggcatgatcttggctcactgcaagctccgcctcctgatttcacgccactctcctgcctcagcctcccaagtagctgggactacaggtaccaccacagtgcctggctaattttttgtatttttagtagaga[137 bp omitted]ttacagattattttactacccccttgattgtagataggcttttgactgtctcaacaaaccgaggcagaagtgatgttggaacttccgaggcgagattaaaaagggtcatagtatttgtgctggcttttatctggatactagctttgagccaccatgtaatgtccagtttctgtgaagtcaccatgctgaagaggtcacagagagatagaaagacatgtctgagaaaccaaagctgtgtcattctctcagttcaggcagtagatgtggaaatgaacaggtctaactgcaatcacattagagaccccaagaatatgtgggattcttttgtattattcttgcatcttttcttaatgtttagaattaattcaaaataaaagttttagaactttaaaaaacattacaaaaatgttaaaaattactacacgagcccccttaaagtaacaagatcatatgtgtacatatatacgcatatcacatacacatatatacacactcatacaaaatcctgtctctgcccactttcctaaacatattctcagtaactaccaacgtcaataattataaatgtacctcctctcatttcactctgtattccactgaatggataagtcatcaaatattttgtcaatccaactgataaatgcaaagtttgctattatcaacaatgcaactgtgaacatccatttacacacatctgtaactgcgtgtctcagtcttcaaatgcatcttaaaagttttctccctttccttcctgatatggtttggctgtgtccccacccagatgtcatcttgaattcccacatgttgtgggagggacctggtgggaggtaattgaatcaagggggcaggtcttttatgtgctgttctcatgatagtgaatacatctcacgagatctgatggttttagaaaggggagtttggccaggtgcgatggctcatggctgtaatcccagcactttgggaggctgtggcgggcggatcacgaggtcaggagttcaagacaagcctgactaacacggtgaaaccctgtctctactaaaaatacaaaaattagccgggagtggtggcacatgcctgtaatcccggctattcaggaggctgaggcaggagaattgcttgaacttgggaggggaaggttgcagtgagccgagatcgcaccactgcattccagcctgggtgacagagcgagactctgtctcaaaaaagaaaagaaaagaaaagaaaagaaaagaaaagaaaagaaaagaaaagaaaagaaaagtggggcggggggggagttgttctgcacaagctctctctttgcctgctgcaatccagagactctgtctcaaaaaagaaaagaaaaaaaagggggggtgggacttttcctgcacaagctctctctttgcctgtcatccatgtaagacgtgacttgctcctccttgccttccaccatgattgtgaggcctcccagccatgtcaaactgtaagcccattaaaccctttttcctgtataaattatgcaatctggggtatgtctttatcagcagcatgaaaagaaagagacacagagacaaagtatagagaaagaaaagtgggcccaggggaccggcactcagcatatggaggacccgcgccagccctggtctcttgagttccctcagtatttattgatcattatctctaccatctcagagagggggatgtggcaggacattagggtaattgtggggagagggtcagcaggaaaacatgtaaacaaaggtctctgtgtcataaacaaggttaagaaaaggtgctgtgctttgatgtgcacgtaaacaaacatctcggtgcattaaaaagcagtattgccgctagcatgtctcatctccagcgttaaggcggttttctcctatctcagtaaatagaacatacaatagagttttacaccgagacattctattgcccaggaacgagcaggagacagatgcttcttcttatcacaactgcaaagaggccttcctcttttactaatcctcctcagcacagaccctgtatgggtgtcgggtgttgggctgggggacggtcaggtctttcccttcccacaaggccgtatctcaggctatcacatggggagaaaccttggacaatacctagttttcctaggcagaggtccctgtggccttctgcagtgtattgtgtccctgggtacttgagattagagaatggtgatgacttttaacaagcatactgccttcaagcacttttttaacaaagaacattctgcatagccctaaatccattaaacattgagtcaacacagcacatgtctctgcgagcacggggttggggctagggttacagattaacagcatctcaaggcaaaagaatttttcttagtatagaacaaaatggagtctacttctttttacatagacacagtaacagtctgatctttcttttccccatagtaaaagctattggatctttgtttgtatatgtgtgcacatatttagatatgtttatgtgattatattgttacatgtatgtaacatgtattatgttatgtgttggtctagcatgataccaaatggccttgtaagtagataattataaattaggtacaaatgcttttcaagttcacacagatcttcagtaaataaaactggttttaaaatcattagtaagataaaaatgtcttcagaattgtcagcatacatttttgtctgggcaaataagttttatagttttatagttgccttggctaaatgttttaaggtgtcacagtttggcacaaaggttctgagactataaacccaactgaaaacagagtaatctttgtgtattttttttgaaaaataaaactaatttaaaatttttagtttaatgaaaacagctaaatcttctgagttattggcaaaatgcccagtgtttaaggttcttacttagatgtatacctgatattcagattttaaaaatggttaacagggaaataactttaaataatcaccagctttatgtagtatctcagttttcagtactaatctagataagctgttaaaaatgagaaaatatcgagtacatatgagataaatgcttatagactttttgtgtaatttaaaaccctaaaaactttaaattaaataatactcattcaccctttctactttcccatatattatggcacagaatggttgatgacagtgtaaatccacgtaataggtcaagacctctatgaattgaaaataaaatgctactaaaattctagagaaaccaagggccagaccaacagctagccaaaaagtagacagtaactcatgacgtgctgctaaccatccattcatctgtcagactggctggaatcagaccatagacgcatcacactcgggtgaaggcagctcctcctcaacctgatacctcagacaatcagactgcttggtcatgtaaatcaagagaggacctaaagctatttattaaagaaaaatcatacaaataagtaacacccttctgttaacatgaattgttaatgaattgtacagtcgtaactacattctttatctttgctaaaactaacctttttgctgaatgggcatagatggtgactttcctccaaaataaaaggctgttgggtctgcagggagctacccctttctttaatcacaggcttgccatggtgcatacaaactgctaacctgagcacttgagtatttttatacttggagtaaaaatacttacctgtttcccttctatgattagagtaccacttaccatgagttccctgcctctgagaaaacacagaaacgtattttccttctggttcataaacaggttaatgccacccccactacaggatatgccatagatgatggcatatgatggttgatggcagtgtaaatccaggtaatgggtcaagacttctatgcattgaaaaacacagtaacagtacaccccacactatctcccacgatatgggatgactacctcttcaacaatgtggccaaacccttggactgactaataacatgtgactaggatggcacaatcaaaatagcatccacctccataacagagcctcatccttccccctggggtttgctatgggtctgcggcactcatggttggccttactgttggggatcagccttaataccacctgtagggtacccgaagtccagtggtgacaaaggaatgagaagagacaggttaagtgttcataaaggtgggagccagggggccagagcaaatcagaggctgcaaaggcccggagctgaagtctctacactatttattgaatatgatcacttagatctgagaagcagatgttcagggcgaaacagtgaaagggaggcagtgcattatatgcgtgatctatagcagtggcggtttaagtgaatctcctttgtgctcagtgtatctttaacttatcggagagtagctggtgggagcaggcttaactaggagcttgcgtatctgtctacatttcaatgtcttaaaggagtgacttttttcctgaacacagcgtttacagataagagagcaggtctcactctgagcatgggaacatgatggcaattaggaggctttcctcctcagaggcctcttgtggctttccacaacttattgtccgatatttttatggccaatttatgcaggcactccacaagcccttttcccagcacttacaactggaatggtagatgcacctaggggcgcccttccctaccaggatgtatcctttcccatttagactctctccatgccaactgggaaagtgtaaaaggcgagacgatcccatcaaaaataggcatcaaggtggttgtacccagtagtcctttctttcccccaggcagtggccacagatgtaaaattacaaataaaagacctggttaaacaaacggctgctacctttaataatatccatcatgtcatcccctttctcgctgaaaaaccctcacaagattagacaagtcgccctgcacaaccacatggccttagatatcctgactgcagcacaaggcagcccttgtgcactgattaagactgaatgttctgtccgggagcagtggactacagtgcctgtaatcccagcactttgggaggctgaaaagggtggatcgcttgaggtcaggagttcgaaactggcctggccaacatagtgaaaccctctctactaaaaatacaaaacttagctgggcatggtggtatacacctgtaatcccagctactggggaggctaaggcatgagaattgaacttgagaggcagaggttgcagtgagccaagattgtgccactgcactccagcctgggtgacacagcaaggctgtctcaggaaaaaaaaaaaaaaaagactaagtattgtgaatatataccacattattctcacactatgacctaagctatgcatacactggacatccatatttctgatacagatataggatcctctcccaggaccctttaacagtgtggtccagctgacttccttataaaagactttcatatacagtatggttggtattcttctcattgtcctcatcagctgctatggattttactactgttatacactgaggacagactttctcaaaagttcctaggtcctcagtcctcacactgtaaggctccagcaagttcctgctatagatctgggaatgtggatatatttccaactccaagtgaatagattccattctggtacttcccaactatgccccctttcagcaggaagcagccagattaactgcgttgcccactttccataaaaataggatgaagtttgacagtggggaattcttacagagtactccagctttgaaatgcattttaaaacttttctccctttcctccccaatctcagaatgtggccttatatgttaaaactcttcatctctccctttcccacgaggtacttcatgcacagtgctcacttgtataattgtgcttgcttagaaattccaagcactaattttaaagcaaaacagacacagactaaataaatcagctgcacaatcctcccacttaagggcagttatgaacagttcatccaccactcctgggccaaagtcaagaagatgcaaaccagacctccaaatgggtgactgctcaagataaaccatcagaagaagacatgcaagacctgcacccgactgcaccgctcccacgtatttcccacaccaagttttccctcttaaactccttcactcagcccaaaaagttggaatggtcttttaaggtatgagcctggccatttcccaattactaacatttgattagtaaaactgctttccttttactacattttgcttttcatgttttcagcctttgagtagcaagcagctggacttaagccagttacacatccataacacaggattacatgccatataatgagataaaacaaacaagatttagctataagggattttcatttatgcataactttgtttcacttttactttggtaaaattgatgtcactgtaattttttgaaaagttaaaatatcatcccaaccttccatgccacagtaaacaattgttagcatattaatatccttctattatttctatgcatataatcacatcattaggtggacatacttctattaattggataatcccaggaagggtctaacctagttttctcatgaataatgtcttctctagtcattacagacctctgatcatcttaatggctgtatattataaggatatatcaagacttactcaaatattttactttttcctttttgaattcaggataaatatccttgtgtacaatctttctcgcttttgtcacaatctcctaagtgaaatttctagtgctaggactgccagggcaaagagtatttattgtccactaataccaagaggtcttaagcatagaatgctgtgtaagtggtaatccatctaaatcattacactgaatacaatttcaaggttgggcacagaggttcacatccataatctcaacacttcgggaagccaaggtgggaggaatgcttgaggccaggagtttgagaccaacctgggcaacactgcaaggctctattaaacaaaataaataaacaataagatacaatttcaataaagactcaacaggtttcttgccctgccacttccttttaaggggataaatgtgacaaattaacatgcctgaaatctgccaaagctccttctaaagcggcctacatggaggaaagactacacatagaaaagcaacttgacctgaacctgaatgaaaataatgaaaggaaaccaagtattaacaattcaagtttactaagaaactttttgtcatcagtaactacttttaacactttcagagttacagtacagcttagtgtccaaaaattctaatcatgtaaattgcagggtcacattagataaaaacagtattgttcagtctataaactgacactaaaaatcatactgtacacaactgatgatacactgtacaaagaactaaggctgaaggatgggagccattcatgtcttttttccaaatttgtgttagtatggatggcagtattatatacttttcagtacttactgaaactaacgttattaaggctacttgcaggattccttttgaatataaattaatataaatttagagtagaaaacagactagaattttcaagtatttgtcctaattataggtattttcttcactttcttcagtaattgctgggccctattatgagccaagcacaattctacatggtagagatagagtggtgaaaaacacctccttacatagaggttacattttagttgacatccattttttctgtcaatcatacttttgttaaaggaaggcctctctcctgtgcagactccgacaagacttttctgctgtgttacatcttgagaaccgggacacctggtactctgatataaacactgatcatatttacagaacaaagttttctcgcatctgtgaaatatgacgtttgtaaagaattcatgtcctaaccaagtctaaaacacagcatttgagagacttctttcctgtcaagattctttgaagcttctagttttaaaggaacttttcacaatcatcagcatggacttcccaacggagacaaagatgtgagctctaactgaaggctgaaccacacctctcatttctacagattccctccagtgtggactctctgatggtagatgagatgtgacctctgactgaagcccttacaacagacatcacatatgtaaggcctctctccagtgtggactctctggtgtgtgtgaaaatgtgaggcctgactgaagcccttcccacactgctgacacgtatagggtttctctcctgtgtggaccctctgatgggcactgagaccagcactccaactgaattctttcccacattcctcacatttaaatggtttctctccagtgtgaattatctgatggacttgaagatttgacctctggctgaaggccttaccacaagtgtcacatttatatggtttctctccggtgtggactctctgatgggcttgaaggtgtgaggcctgactgaatcgcttctgacatgcatcacacttgaatggtttttccccagtgtggacgctctgatgggcttgaagatttgaagcctgactgaaacccttaccacactcttcacatttgtagggtttctctccggtgtggactctctgatgattgtgaagattcaagctccaattgaagcgcttcccacacacttcacatttgtatggtttttctccagtgtggactctctgatgtgcttgaaagtatgaactctgactgaagcctttcccacacacgttgcatcgaaatggtttctctcctgtatggaccctctgatggctctggaaacttgaggctgaactaaaacccttaccacactcttcacatttatatggtttttctcctgtgtggactcgttgatgactatgaagattaaagctcaaactaaagcacttaccacactcatcacatttgtatggtttttcttcagtgtggactctctgatgggtatgaagatttgagctacaactaaagcgtttaccacaatccccacatttatatggtttctctccagtgtgaattctttcatgggcctgaagatgtgatctctgagtgaagcccttcccacacacctcacatttataaggtttctctccagtgtgaactctgcaatgaatgttaagatctgtgctacgactgaagcccttcccacaactgtcacatctatagggcttctctcctgtgtgaataggcaaatgagcataaagatgtgagctctgattaaagctcttaccacactcgtggcatgtatagggtttctcccctgtgtggactctctgatgagtttgcagatttgagctctgactgaaacctttaccacattcatgacaccaatagcgttttttcccagtacgaacactttgttgaacaggaatacctgagctataactggtgtccttctcatgtgtactacacgctggagacttctttcccaagtgtacctgtttatgaagttcaagactggagctatcattgaaggcttcttcacattcattaccctggtaggttttctgtcctgtgtgaatactacgctgggtaagaggtgatacctttagggtatctttaccacaatcactattgctatgaactttatctcttttgtgcactatattatcatcatggtggtgtgaaatacaactgaaaatgtcaacatatggagcaaatatacatagtttgtttttcatctgagtctgcttacaacttctctgataattctgtgtctcattcagatatattttactccaagaattcggaactttcccagttggaaattcttgattttcaatgatactggaatgatcccctatgtgattcactagacagttgtcatccacagaagcttgaatagattctcctgctcccacttgacagggggaatcatggtgcttggggaactgagagctctttccttcaatatttatcatggagtcttgacttctggctaatttgctcgcaatgtgtctcttgatttgccagcatgaaagctctcccagtgaaaagcaccttaatcctgctttgtgaagagttgccatctcattttgattcctgtctcctgaaaggatagagagaataaggaataaaggaccaagagactgacattagcaaagtagagaattaagatctaagctctcattttccccatggaaacgtcaaaaaaacaactagactggctgaaataaatttataggaactctgaaaagcagctgcaaccaagagaacaccaaatgttttaaaaagccatatttaagatagaaaatttgagatcagcccagggtatggttaaggtgtatcttgggtcttttctgagtatgagtcttgctgcctgtgtgtattctccagtatacacaactccaaagtgaatgctttgtccagatgtttccaaattttacacatagttccttcggtatcaggctttagttcatgatggaaactttcagcttatctttaccatcacagattttcctggattttatttgcctctcgaaacacagaactacagatctaagaataggacaagaggtagaaaccagccaactgcagaacaacaaaatgatatctcagtaagtacttagaaaggaaaaattgacttctttgcctataagaatggtaaattaaaagtcacctcttctttggctacagcaactgaatcgtaagtagcaactacataaatcaggcaaaatatatgcctcaattataggctctcattatacaacctgcacatctagaaacatgctcaaaataactgatagacaaatccatatttatagctggagatttcaatacccctttccaacagctagtaaaccaagtaggaagatatgtggtggcactcatgtaactgagtccgtgctgtgaaagggacagctgccctggccccttgggggtcagaagtcaccatgccaagggctgtgtgaaaggtgctaagttccactgagacccaagctccagtttttgagaagccaaaaggagggagcaccaggcttccttccaaccagtggtgctggtatcctccaagtttcttcctccaggccacctgtggatatgccatccagaaaccagtccagcccagccaagatgatgacctgtccccttatacgctgctcaaagactaccagaactttcccaggattgagagggttgatgacattgggaaaagacacttgtctttggaaatggccaaccaggagaagccaaaaattaagccagaatagttgataaaaaaggacatggcaagccctgaggacaccagctccacagaggctggaattatcgacttgaacatcaaggcccacagttttgttttgttttgttttgtttttttgaaatggagttttgctctgccactcaggctggagtatagtggcatgttctcggctcactgcaacccccgcctcctgggttcaagcgattctcccacctcctgggttcaagcgatcctcccacctcagcctcccaaaatgctgggattacaggcatgagccactgcacctggccaagatctgcagttatgaaaaacacatgctgacatattgaaaggacaaagcccacaaatgctatctgctgataagcatcaaccagaggaaaaagatgctcaaaaacctccacaaaacctattatgacaactctgggaagacatgcagggaactggggactgaagacacctttcccctctgaattaccaaacagcccactgaccgtcgcttctgactaagaaggctctgtgaattcaggttttccagaatgtgcaaaagctgaagaaacaaaaaaggtcttagctgcagcagcatcagcagtcagaaaacaaaacaaaacaaaaacaataaattatataaaaaataaagcaaaacacaacaaaaaacaagtaggtaataagtgaagatacaggcttgaagcaatattatcaaccaagttgactacttggtctttctaggacactctatccagtaagagcagaaaatgttattttcaggtgcacatggaacatactccaagacagaccatattctaggccataaaacaagttctaacagatgcaaaaggagtcaagtcatacaaagggtattctaaccacaactgatttaaatcagaaattatgaacagaaacatctctgcaaaatcttcaaatattcagagaataaataacatacttctaaataaactgtggatcaaaaataattcaaaacagactttataaattgagtgaaaataaaaaaccaatatatcaaaatttctacttagagcaaaatttataaagcagaaatgtgtcatagaaactaaaaacacaagaacaaattaaacacaaagtaagcataaatagaaaataagaaaacaaatagctagttctttggaaagaacaataaaattaataaactctagcactcatgataaaaacagaaagaagatacaaattacaaatatcaggatgagaggtgacatcactatagatcctgtatatattattaaaaggataagggacttatgaactttatggcaataaatgcaacaatgcagatgaactggacaaatttcttgaaagacacaaaataagtttacttgagaacatacagataatctgaatagcccttatctaccaaagaaacagaattcatacttacaaatatttccacaaacaaaagttcaggcttatagggcttcatccatgaattttaccaaacatataaggaagaaacaataccaatgctagacaaactcttccagaaaaatgaaaaggtgtaaatacttctcaacacattttaggaagccagcattattctaacaccaaaataagacaatgacattccaagaaaaggcaactacagactaacattcctaatgaacatatttataaaattcttaacaaaatgtgatcaaatcaaatctaacaatgtataaaaaggataaatcaagacaaagtagtgattatctcaagaatgcaaggctgatttagtattctaaaattagacctaaatgcttccctcagaaaatcaggaacaaggcaagtatatccactctcacaacctttattcaacattactgaagttctagtcagtgcagtaagacaggaaaaaaacaacataaaagaaataaagatcataaaggaaaaaatgagccagataaataatttgaaatactgattttaaggaagctcaatgagatacaaaagaaatttgaaaagcaatacaaaaaatcaattcaggatatgaatgagaaatttaccaaagagaaagagataggtatcttttttttaaaaagccaaacaaataaaaacttctggaaatgaaaaaatcattgaagaaattacaaaatacagttgaaagcttttacaatagactagacaagcagaagaaagcatctcggtacttcaagacaggtcttttgaattaatctagtcagacgaaagtaaagaaaaaagaataaggaagaaaaaacaaagcttctaagaagtatgaaactacataaagcaaccaaacctatgaatcataggtattcctgagggagaagaaaaagtaaaaagtttggaaacctagttaaggaaataattgaggaaaacttccttaatctagcaagagctttagatatccagataaaagagatctaatgaactccacgaaaatacattgcaagatggaactcaccacagcatacagtcatcagactaaggtttatatgaaggataaaatcctaaaatcagcaagagaaaagtgtttagtcacctataaaggaagctccatcacacaattcaacttgtagaaaccttacaagccagaagagattggattctattttcaagttgcttcaaaaaacaaaaaaatttgtatcctactagaataagctctataaatgaaggaaaaataagccttccccaaataaacaaatacttagggagtttgtcaccactagaccaggtctacagggaatgctcaagtgagttctaaccatgaaaacaaaaggttgatacttgccatgataaaagacacaaaagtataaaacttgcaggccttataaaataattacacaaagaaagaagataagtcaaatggcaacataactcatcttaccgataaagacacagactgaaggtaaagcggtagaaaaagatattccatgcaaatggaaaccagaaacgagcaggagtagctatttttatatcagataaaaaaagactttaaatcaacagcagtaaaaaaagacaaagtcattacataatgataaagtgatcaataaacaaataagataacaatcctaagtatatacacaccaaacatcagggcacccaaattcataaaacaaatattattagacctaaaaaaatacacagcaatacaataacagtgggggacctcaacaccccacagacaccactagatagactgagacagaaaatcaacaaagaaacactggacttaaattaaattttaggtcaaatggagctaacagacatttacagaacattctatccaacatcagaatatacactcttctgattagtgcatggagcattctccaagatagaacatatgttaggtcacaaaaaaagtctcaatacatttttaaaaaccaaaatcacaccaagtatcttctcacacctcagcagaataaaactagaaatcaattccaagaagaactctagaaactatacaaatacatgaaaattaaacatgatcctaaacaatctttgggttaatgacaagacaaattttaaaatttcttgaaatgaatgaaaacgaaaatacaatataccaaaacctctgggataaagcaaaagcagtgctaagagggaagtttatagtgttaaatgtctacactaaaaaaaaaaaaagataaaaaattaacaacctgtgtctcacctccaggaactagaaaaacaggaaaaatccaaacccaaagtcagcagaagaaagatataacaaagaccacagcagaactaaataaaatagagaaccatggaaccatacaaaggatcaatgaaacgaaaagctcgtttttatctctgaaaagataaaattgatagactgccagtaagactagccaagaaaagagaagatccaaataaacataatcagaaatgaatgagacattacaactaataccatagaaataaaaaacatgatcagacactcttatgaacaatacacttgaaaactagaaattctagagaaaatgaattcctggaaacatacaacctcccaagattgagcccatctggctcccaagattgagccaggaggaaacagaaatcctaaacagaccagtaatgagcagtgagattgaatcagcaatgcaaaacctcccaagaacaaaaaagcccaggaccagacaaaggtacactggaattccacaaaaggtacaaagaactggtaccaattctactaaaactctttcaaaaaatctaagaggagagaatcctccctaactcattctagaaagccactcttgctctgataccaaagtcagataaagacacaacaaaaaaagaaaactacagagcaatatccctgatgaatgtagatgcaaaaatcctccaaaaacaaacacaaatccccccacaaaaccccccaaaccaaatctaatagcacatcaaaaagataagccaccatgatcgagtgggttttattccaaggatgcgagaatggttcaacatacacaaaccaataaatgtgattcagcctataaacagaattaaaaacaaaaaccacatgatcatctcaacagatatataaaaaccatttgacaaaattcagcatcctctcatgataaaaacctttgacaaactaggcacagaagaaacatatttcaaaataataaaagccatatatgacaacccataggtaacatactgaatggggaaaagctgaaagcattccccctaagaactggaataaaacaaggattgcccactttcaccactcctatttcacgtaccactggaagtcctagccaaagtaatcaggcaagagaaagacagaaaaccaatctaaattggaaaagagtaagtcatttaatatctctgttttctgacaatctgatcttatacctacaaatccctaaagactcctccaaaagaatcctagatttgacaaatgacttcaataaagtttcaggattaaaaaaaatcaatatacaaaagtcagtagcatttctatacgacaataatgatcaggctaaaaaccaaatcaagaacacaatccaatttatagtatctacaaaaaaattaaaatacctaggaatgtatttaaccaaggaagggaaagatctaaccaaggaaaattatgaaacaataatgaaagaagttgtagatgacataaaaaaaatggaaaaacatcccatgttcatggatcggcagaatcaatattgttaaaaagaccatactgcccaaagcaatctacaaattcaatgcaatggctatctaaatactaatgtcattttttgcagaatgaggaaaaacaattctaaaattcatatggaaccaaaaaagagcctgaatagacaaagcaatcctaagcaaataacaaagctggaggcattacattacctgacttcaaattacactacatggctatagtaaccaaaacagcatcgtactgatataaaaatagatacacagatcaatggaatagaaaagagaacccagaaataagtcacatacctacagccaactgatctttgataaagtcgaaaaaaacatacactggggaaaggacatcctattgaataaatggtgctatttaatccatcttgagttcattacctgagatctccagagatccataacagattctaataatagccattctggctggtataagatgatatctcaccattgttttaatttgcatttctagaaatcactggtgatttcaaccacaggaggcaacctgaaaaagctccaagtggtcaaagtagaaataacttggtaacaaaataaacaatgcaatactggattataacacgaagtataaataaatacatatgagcccatactgattataaaatggatagtaagtgacaataaggagttactgttgtagatagacactgataaatctatgggtgatatgacattctccagcaaaaaataaaagggaaagataaaacaggaacagcagaaagttgataactgctaagacagtatggatatacagagtctatggcattatttacttttctatgttttttaagttttcaaaataaaaagtttaaagtcataggaaaacaaataggtcatccaaattatgtgtatgttgggggaagggtggagaagcagaaattatccatttaaactatcagtcaattttcattaacagaaaaagatgtaaaatgaatgttaaaactgaactgaatggtgggattacaaatggcatcctactaagtcatttttgtcacatatctccctcagtttggtggattagatgatatcttaacaaaggacataagcaattttagaattaatcaattttctatgttttatacatttttgaagtatatggacctaacaaatatatacacgtagactatgattatacagaacactccacccaataacagcagaatacacatttttctgaagtacatacagaacattttctaggatacaccatatgttaaactacaaaaaagccttaataaatataaaaatattaaaatcacacaaagtatctctgctgatcaaaatgaaatgaaactagcaatgaatagcagaataaaacctgaaaattccataaatatgtgaaaattcaacaatacacatacaaccaatagatcaaagaagaaatcacaggggaaactagaaaatatcttgggataaatgaaaacgaatccactgcaaaaacagtgctaagggggaaatctatagctataaatggttacaatgaaaaggaaaaaggtctcaaatcaacatcataaccttataccttaaggaaatgaaaaaagtaacaagccatcgccattaccaagaccaagatggctgcaagacttgctgccttcttcaggaatgcctgggccaagcagccagtgctggctgtgtccttcaccattgcaggccatgctataattctgcccccactcagcccctacaccaagtatgccatcatgatcaaccaggccacaccctacaattacccaatgcctgtctgagatgatgggagcatgccttatgtgtccagccacccccaggactcctagggcccaaccctggagtggctgaagaaactgtgagcatctccactgacagggaggaggaccctccccagtggctcccaataaaaatgtgaaaagcaaaaaacaaaaccaaattaaacccaatactgacagaagaaaggaatctaacctttttttttgagacagagtttcgcttttgttgtccaggctggagtgcaatggtgcgatttcggctcactgcaacctctgcctcctgggttcaagcgattctcctgcctcagcctcccgagtagctgggattacaggcatgtgccaccacgcccagctaattttgtatttttagtagagacagggtttctccatgttggtcaggctggtctcgaactcccgacctcaggtgatccgcccaccttgtcctcccaaagtgctgggattacaggcatgagccaccgcgcccagctggaagatggtattttaagaaagcctctcatgaaatgatttctgagcagaagcatgaatgaaataaggaagaggggctgggcgcagtggctcacatctataatcccagcattttggggaggctgaggtgggcagattgcttgagtccaggagttcaagagcagcctgggcaacatggggaaacctcgtctgtacaaaaaatataaaaattagctgggtgtggtggtgcacacctgtagttccagctactcagaaggctgaggtgggaggattgcttgagcacaggaggtggagactgcagtgagccgagactgtgtcattgtactccagcctgggcaacagagtgagaccctatctcaatcaatcaatcaatcagaaagacaaaggtttaagaaaaaacagcattccagccagagaatagaaagtaaaaggctgtgatgcagatgtcatatctgaggaacaagtgagggtggcagagacaaagggagggggaaaaacagaatggtaaagctaggtgaataggcaaacattatacagccttacaagctccttaaatacactggattttactcatgaaatgggaagccagtggaggatctgaagcagagagtgacatgatgtgacagatgttttcattctttttttttttttcctgagacagagtctcgctctatcacccaggttgcaatgcagtagcagatctcagctcactgcaacccacgcctcccaggttcaagcaatccccccatctcagcctcctgagtagctgggactacaggcacacctacatctagctaatttttttacattttgtagagacagggttttgctatgttaaagaccccaggctggtcttgaactcctgacctcaagtgatccacctgccaggcctcccaaagtgctgggattagaggcttgagccatcgcgcccaaccatgacagatgttttttaaaaaagtctctcaggtagctgagtggagaagaaattatcctgaataaaggaaaaataacagctgttaactacgattccggctgcacagtactcacctgaatgcttacctctttgggtttgaagctccttcatccaaagcttttcttccctctccaactgggatatcatatctggtttgaaggactgatgtcctataaaaagatagtatttaagtgaaaatgttaaaggcaaagagtactgaaaaaatctggttccaatcacatgatgtaagtctcctccctgccccagcatgcaatgtttagggaacatttttttttgtcatgacacattataagaaatacatttactatcactggaaatacattaccctgtgtaaactattgaaataaaaggttaaaggacctatttctaatcaatatctgttttcatcacatcccttacggcaagcagcagcagttattgccacaatgtgcaccattctggctaaggggctctgatattgttactctattttattacaaaaatgcttatgtaacttactaatttactgacccaccaatggatcatgacccacaagtttaaaaaagatatacgaaataaggaatcaggaggagccaagctcaactgttcttttatagttcatgtctaaaagaaaatcatctgtcttggaacaaaggtcagaaacatcttgtctctatgctctaaagagatagaaaaactctagtctctgagcagtcccaaagccttgaacaaggggacagaggccagggatgccactaaacatcccaaaatacacaggatagcctgatacaacacagaattatctggcccaaaacatcaatggcatggaggttgagaaaccctgctgaattacagagggtgcctgtccttacccactgaaaccaggttcctaaagttctccagcatcacatctcggtacagcttcctctgggcagagtccagcagccccagctcctcctcagtgaaggccacagccacatccttgaatgtcactgcctcctagaacatcaagcacatgtaacctcaatctcacacccaatggccactggcacctaagcaactctttctgtagagttactattcttccccttccacaatcacaccaaaaatgctagggggaagaaggaaaacaccttgtacatgtaacgtggtgccctttatatagttaaattcctagaactgtcattgttaaatcatggcatacacacattttaccatttgactgatagcaccaaatttgataagaaattttgcattaatttcttcccaacagtgtttgatagtactaccactattttgtcaatccaacaggccttcataaagctctggcacaagtacgcagttcactctctgggttctcaggaacatgctgtcttggtcaactgcagcagcatttagggtcaaggttaagagtacaggctctggagtttgactgccttagttcacattccaagggtctatccattgctagttttgtgacgctggtcacaaaacctcaatttccacatctgtataagaggacctatatcatagggtccttgaagggattaaatgagtgaatacatataagaacttaggacagtgtgtgacatacagtaagtactcaataaatgttgatcattaactcttattatcatcaccatcatctatttcatcccattcatagctgcatgatagtccataaacatgatctacaatatatttaaccattctaaataatgcacatttgatcattttaaatttaaaaatgacaatgccacaagaaaacatatttttacatagatcttagccagctcgtatggttatttccttaagataagttccagctgggggcaatggctcacttctgtaatcccagcactttgagaggtcgagacgggcagatcacttgaggtcaggagttcaagaccaacccgacaaacatggtgaaaccctgtctctactaaaaatacaaaaattagttgggcatgatggcacacatctgtaatcccagctactcggggggctgaggcaggagaatcacttgaacccggcaggcggaggttgcagtgagccaagatcatgtcactgcactccagcctgaatgacagagcgagactccgtctcaaaaaaaaaaaaaaaaaaaaggtaagttccaagaagtggtaattacattgtaaaaaaatatatatacctttgttttgctggtataatgttaattttctcaattaactcttcccgtaagagattataagtattcccgattctccatactctggccaaaactggacatttttttttttaaatcttgagtaatttggtgagtgatataaacagctatttaatttttttaaagatgatctgatattacttttcttcacatattgcctttccttaatcctactgggatttttcatgtatcagtaacattactattaagaatattaagtcattttctagaatatataaattcctaccccgcacctgtttcctacttgtctcataaagtttgtatatggtgtttttctgtatggaaattaacattttttatctgaagacactgcacatccctgcatttgttttggctggagttctgaacatctatgtaccaaacaactcgatgacacatgtggcaaagagccatgcactgagaaagggaatctggtgaagagcaatgtgatttctggagcccttcatccaccaggacatgccagggacacatacatgtgtagcatagcctcaagtccctgaatagtctcttttttttttttcttttttgagacagtctcactctgtcacccaggctggagtgtagtggtgtgatcttggctcactgcaacttctgcctcccaggttcaagcaattttcctgcctcatctacatgagtagctgggcttacaggtgtgcgccaccacgcccagctaatttttgtatttttagtagagacaggctttcaccatgttggccaggctgatctcgaactcctgacctcaagtgatccacctcagccccaaagtgctgggattacaggtgagccactgtgcctggccttcacccaaatggaacacctgaaacttctggcttaggcactggaagctttaacgtcagctgggcattgagtggacttcaataagtgtctaaaggttcacacctgtctctttatgtttaaaatacagataaggccatctacatcctcacaaagctgttccatggtgcaaattcctggtgaatctcctagtgctataagacttttaaactaagtatgtgcatctttaaaatataataacatgttaatgaataaaacagatacttaactataatacaaggttttacttagaattaaagaaagaaatctagctcgtttgaaactaaaattactttctctgagtttggcatcagtcagatgctactgcactaagctatactttattctctccataaaatgaggtgctgtgtatgagaaaatgagtctaaaactttaaagattaaaaaaatggtagaattctcagaatccttatttgggaagagaagttacatggggaaaaactgctattgtcaatgtccttaaaatggcaaaattcatagattacataaacatggagaatgaggaaaaataaaaacaagtaaatgatggaaaatgatgtgatcatttaaaaagcaggtgatataaaattaaatttaaaaaattcgaaattgtacctaaagtatgattatatatgttgagtgcaaatgaaaaggaatgtgggaaatgatttgtaaacatatttgtaatgtgagagttgttttccatttaaaaaatatatctgttaggccacggcaggaggatctcttaagcccagaagttcaagaccagcctgggaaacacaggaacaccccatctctactaaaaataattagctggttgtgctggtgtgtgcccgtggtcccacctgctcaagaggctaaggtgggaggatctcttgagcccaggcccaggctgcagtgagccactgcactccagcctgggaaacagggtgagactctgtctctaaatatatatagagatttatatttacatatatatatatatataaaactatatacttatatatgagtatatatatacttatatatatataactatatacttatatatgagtaaatatatacttatatatatttgtatgtgtttatatatacatatttgtatataaatatatacgtatatatttgtatgtatttatatatacatatttgtatatataaatatatacgtatatatgtatatatttatatataaatatatacatatatacgtatatatttatataaaatatacgtatatattgtatacatttatataaaatatacgtatatatttgtatatataatacatatatacaaatatacgtatatttcttataaatatatacatatatatttgtatataaatataaaatatatacgtatatataaatatataattatatagaaatatattttagaaattaacagatatatatatatctctctgttaatttttatactattatattgaaataaaaggcaacaacctggcatataacaacattccaagtgcctttcgttcccttttactgttcccaaacaggaaaaatgtgtccaatctttgtgaaatgagatgtcattttaagaaacacaaaggcaaaccaaacttacctggaacttggtcatttttcccctcctccttctgggaaaaggcagagttccggggaagtgaacctgagggagggaaaggcatcatgagataggttagggatggcattagtcaccatggcacttttatgtgacacttcagagaaaggtccccctgtctctaggcagacacagttgcacacggcttagtgaggagaacgggagctagctcccagctacccctcggccccctcaaccagctgcttttgttcatgaacatttcatattaacagacctaaatcaaatacagctctctgtgtactccttctgaactttagtttccaaggaaatgagacacagacaggcaggggaatgtaacagagccaaaatgcctggcttcaaattttggcatttctacctattttcaactgatcagcagtataaaccttaagcgaattattaatctctctgtgccttaattcagttacctgtgaatggggacaataataatgcctgtattctctatttcctgcagcttctgacaagcaagtgctattatgcttcataaaactgcccttttgagtatgctttctagaaaatgaatcttttaagaaacccagaactcaaaaataattgctctgtcctgtgagttaccattaccctcagaaaagtctgtaactgtgattggttgtctaacataattagttccgttggtaatgatagttaaactgccacaggtttttttttcctccaacagatgtaattacttgcaaatgttactaagctggaggagcctcaagaaagtctctttttccacatgcatgaaagcaatgactaataaaaacctaaaactctctaagaaatggtgttacacttaagttaaccacacgggattattggttataaccacattatactgaacatttattagggcctcaggacacctctggcactctgcaaatccgtaatgacgatcgcttatctgagataaaacacacaggacattccccaggctccgctggaactaattcctgtctcctaaacaagaggctagaaaagtccaagaatccaggaacggccccacatcaggcaaggattagagaagggacagcggctccgtagctggatctcctagactcagaggagtttccaaacaacaggcgtctttttcagtattataacagaattaacggtggcatccaacattttcctatgcactggttttaagcttatttctataaaacctcatttaattctcacaagaacatcactgggaacgcactaaccctttacaggcacgaggaaactgagacaaggagagattaagtaacttgcccaatattttactgcgaggagcaggcaggactggctggtaggtgcgtgaggacggctagggcagcagaccctcaacctcgaaggacgacgcgagcccgcctcccacgcaagaggttctgccgaggggacgcaaactcccgcagcctcccaaccccgccctccagcgctggccgcggcttctcttccccaagccaaggacgggttcattgctggccccacgcctaggcaaagagggctcggagaagtcttggagacccggagctgactcacctccctgggagatatctcagatccgacctcgccttcctggagcggaagtgcctccgagtgcccacggttcgtggactccacttcccagaattcctaagcggaagcgtctcagagttctctcactcctggactacagttcccagaatgctccaagggcagcgcttcccaccagctgggctttgttttgactcaagccggttgggtttgagccacttctctggtgctactactgtgagattcgtttttgttttattcatttttaaaagctcatgagaaaataattgtaaaatttttaaagtgatgacatataaaaatgaaaagtgcagcttgtattattaaaataagttagaaaccaaaatttttcgcagaagcagagggtaggctaaaatgggaagcgtaaaagtgacttaggctgagctccgatggacgctgaacgttaaggaacaccagatctcaaacttgtgtcaaatgccggctccccaaatatcatcaactcaacctgttgataagacaaaaaacagaatttattgttgattgcagtaatggagaacaacacttcgacggagcgttggcaccttcacagagcaaagtgtcaaggcaaggttggaactgattgagaactggatgtttaaggcgggtctttcaatgcaagggattttattagtattgcataatgatcatgatactacagtccaggattggtggatatagcaaggatttttgaagcaaagaatcttaaattgcaatctattgacactttctttggaagagattgaaaatttgatgggtctctgtggaagttcccataatgaacaattaaacagtttgcttgggcaggaatctcctggaataaaggcctgctgatgaagacagctgaacaatcatgttagtgccgaaagtaaattgtgatgaaacgggaaaagttcacttctccctctcccagggcatgtgatggggtgtggctcgcttcttcgtgcccagccgctcaaacctctaggggagcatgcacacgggcaggttgtagggctccaaccccacggcagtgtctaggggtgaatgtttacagctcctgaagccccagtgggcgtgtgttatagggtgcttttttagttcagccatctgtaggaggcttgtgttagctcaattagacccctgacttatcgcaagcaagagagggctttctgtatcccagaggttcttgccttggtgtaccagaagaatcgcatcacacataggcttggagaaagagtgcaaggattggagaaaccttggagaacgatttgtaagtagctctcagcagaagggggagccagaagggagatggttttcgcctggagtcagcctctcagcggcctgggcgctcctccgactacccaggccaaactgcgttattccaccggttaatggcctgctggcctgccggtctcttcagtgtgctcttttgccgacccgctcccctcgacagcctctcgacagccagctgtttgtgtgtccgccaatgctctcctctcaacgtccagcagcttgtgtctctgcctgctagggtatcagggtttttataggcacaggatgggggcgtggtgggccagggtggtcttgggaaatgcaatatttgggcacaaaggcaggaatgcctgtcctcacctaggtccgtggccacaggcctgggggtagagccctagtcagggaccacacccttctcccctccagcacttccattcccctcttccgtatcagtgaggggcagggaaagaggatggagttttagtccttagtgtccaagttgtgtatatttaggggtcggtgacaaggagagaagggagtaaagtgtttgactcttttccctccattattcctcaaggtacctaagggctcatgacagtgttttgtttaatgtgctattcgttctaatatactaagaacccacaaaaaggcaatataaatattaagccagagaaatatcttgaacttcatttattttaaatgtgtactgttatggcaaacaaaagcagctccattggccgggaatctaagacaacgttgtaatatgggcatgtgtaaaatcttgaattgttttctaatttgtgttcggcttcaaatatttcattacatactttgatcctgatcctgacataaatgaaattaagtgtcttatggttgaataaactagatgaaacaaagaagccgtgatttttctcctaggcaggtataaatatacaggtgaccattgaaaaacacaagggttaggggagctgacccctgggcagttgaaaaatctacctgtaagttttgactcccccaaaacttaacttacttaactaccaataacctgttgaccagaagccttaccaataacataaacaattaacatatatatgtgtatatatatatatgttttttgttttgttttttgagacagagtcttgctcttgttgcacaggctggagtgtaatggcacctcccgggttcaagcaattctcctgcctcagcctcccgagtagctgggattacaggcataaactatcatgctcagctaattttgtattttttttttttttttagagacggggtttctccatgttggtcaggctggtctcgaactcccgacctcaggtgatctgcccgccttggttggactgtattcttacaataaagctagagaaaataaaatgttattaagaaaatcataaggaagagaaagtattttttgctatttattaagcagatcatcacaaagatcttcgtcctcatcatcttcactgagttgaataggctgaggagaacaaggaagagaaggggttggtcttgctgtgtcagggatggcaaaagcagaatacaatgtatgtataagtggaactgcagagttcaaacctgttttgttcaaaggtcagctgtagtttgttacattttattatcaaagttttcaaacatatatagaagtagagagaatagtaaaatgaactctatatactgatatcccaaattcaataattaacactgtttagcctatttaattcatctatcactgtttttttagttacaattctaaagcaaattcctgtaattatgtcttttcacctcaaaatgctttgctaaatatattttaaaataaaaatattttctttcaaaaccacaatactattatcacactgaacaaaataccagttatttcttagtatttcctaatacttgacaaccaaaatgagtgactcaggcataagtctcagtcattgaggtttactaagccagctgtaggacctgccggggaaaaacaaagccacagacacatctgtgactatctttccaaagaggttttcgggaggtttagtatttgtcaatttccttaaaggggtggggaagggatataggaagaggggtaggtatgcagttaggcgaatagttacattcttgtgagactttagttagtccccaataaatctacatttttacataaataaggtgaatgtcttaaaaggaaaagggagtaaaagaagagtcaattatgtagatgtatgtggaggtagaggagagtaggtggaggaatgagtcttgactttgttctgcacctgggaagataaacttgtaatcaacattattgtaatcaccgagggttcttcttactgcctagaaaagccagtgcgctgaggacagcaggttttgaagcaaataaatagtttaataattgcagggccagccaaatagaagaatgggagatatctcaaatctgtttccctgagaattcaaaggctgggatttttcaaggatagtttggtgggcaggggctagggaatgaggaatactgattgatttagttgggaatgaaatcataaggggtcgaagctgtcttcgtgcactgagttagttccagggtggaggtcagtttcttggtatgggatactggtctgggtgacatcatctggtccatcagaatgcagggtttgaaaaatacctcaggcaccagttctaggttttacagtagtgacgttatctataggagcaattaaggaggttacaaatcttgtgacttacagctttgtgactccttgtggacaatttgttagctttacgaaggcagtttcagtccctaagcaaggaaggggttagttcc[138 bp omitted]gcctca[224 bp omitted]atagttagcttggcctatgcacaggaatgagcaagtacagcttgtggggtgagaaccaagatggagtcacttatgtcagatttctccactgtcatcatttttgcaaaggctctttcatgatcagtgtggagttttaggagctagacttagattgtagaactaaagcaacaattggcatgtgcctgtttatgagaggtcagcaaaaattttacttatgagtaatctatggggaaagctcttcccaaatacctgaggcttttcacctttcatggggatctggctaatgcacagctgttcgtttggaagagggtattgcaatgactgaactccagggcttaatctccacacttgcctaagtttggaggatcctgagatgtttattttcctttacatacccaatctctattaaaattttcctgattacctaaaaatatctcatgactggtttgtcaaatcaatatctagcccattcattttatttatctacttaggtgtatttattattgaacactactacatcactcctttgtttcagaccctgacctgttgaaggaattaggtcagttgttatgatattacacattccggatttctccaacttttctggcctctgtccctagttcctgggaggtggcatctaaactcttaaaatatcctgaattatagaagctctttgttattcacggtgggccactcacactatacctgacagattgtgctaaagaggtgacacatgatgggcctctggataagttatgctagtgagattacttcagataggtgctagttacaccagacagatcgatcatgtgatttgaagtttgggactatgagccaaataacaccagcctgtgtagaggatgggggctagacactgagttacatgtcagttcaatcagtcatacctacgtaataaagccccaataaaatctatgaacacaagcttggatagacttctatggttggcaagtattctcatacagctatgtgctgggagggtaatgtgtcctgaccccaagagaaagaaccatggaatttttcatctggaaccctcccagaccttgtcctatgcgtttctacctttggttggttttgatttgtatcctttttttttttaataataaagctgtagttaataaatataattttcctgggttctgtgagttgtttcagtaaattgttaaacctgagaggttagtgatcagaagtggtcagctggtcagaagtgagggtggcatggaaacccttgaacttgcagtttggaatgaaaaaagtcttctgagcactgtgcacttgaactgtgaagtttgacctaacactgagtaattagtttcagaagtaattacaccacttaataatatgggctaatacctttacgaacctcagggcagaaagtattttgtttagagacagggtctcattctgttgcctaccttggagcgcactggtgaaatcatcatagctcactgtaattttaaactcctgggctcaagtaatcctcctgcttcagcctcttgagtagctaggactacaggcatgtaccaccatgcctggatcattttttaacttttttttttggtagaaatgaggtcttcctatgtggcctaggctggtctctaactctcagcctcaagcaatcttaatcctcccacctcagccttccaaagtgcagaggattacaggcatgaccaccttacttgatcaaagttttcttaatatgtgcatacctgggagatattgcaggtttgggtccagaccactgcaataaaatgagtatctcaataaagtgagtcacatgaattttttggtttcttattgcacataaaagttatgtttatactatactgtaaacataccatttacctgtgtaatagcattatgtctagtggctcatgcctgtaatcccagcactttgggaggcc[135 bp omitted]gaggcaggagaatggcgtgaacccgg[138 bp omitted]acaatcatttgagccttctgtgagttgtgtaatcttttatctggaggaaggtcttcccttgatgtttatggctgctgactgatcagggtggtagttgctgaaggctggggtggctgtggaaatttcttaaaataagacaacaatgaagtttgcccccgtgatggactcttcctttcatgaaagatttctctgtagcatgtgacggtgtttgatagcattttacccaaagtagaacatctctcaaaattggagtcagtcttctcaaaccctgccactgctttatcacctaggtttacatcatattcgaaatcctttgttgtcattttaacagtggtcacagcatcttcactaaaagtagattccatttcatgaaaccactttctttgttcatccttaagaaacaactccttatcctttcaagttttatcatgaaattgtagccattttgtcacatcttcaggctccacttcaaattatacttttcttgatatttctaatacatttgcaccacctgagtgctactgtccatttcagagtctacttcccagggaatgcaacccgcaacaatgcttctctttgggcagcaggctcctttctctaaaggctgctaatctttggtgcatcacccagtcagtgcatatttctcttggtaccacgcttagctaagctatacttcttccacgtattctggattgagaaattgcattttccacttctatgatatcactgggtatttgttaactcaatttcccctattagtagtaatgatattattagtattaatatttttaaattataaaatcataatctactattttcttttaaataatactaaagataacagctaaaatctccttcgaccaccacagctgcccagtactcttctccattccctgtctttaaggtagagaccattatcagtttagtatctattcttatggactcttttttgtttgtttgttttattgtatttttatttattctggactctttattctgtattttatttatttattctggactcttttatatgtatttaaatgtgtagaatgtgtgtccttgtaagacttaaagaacatcattcatcttacatgctatataatattttgcaaatgtgcttatacagtttatatgaaagacacagaaattgttttcaatttttccactattacaacaaagctgcaataaacgtctcattcatgccctcctatgaggtgtgaccattctccatgggagaggcagaaaaattgcaattgctaggtcatgtggtaagcatatttaaacatttgatagctactgctaattaattcctcaaagcaattgcactagtttccactcccacaagcagtttatgagagtagcaaattcacc[131 bp omitted]tgaaaccccatctgtactaaaaataaaaaagttagccaggtgtggtggtgcatgacggtaatcccagctacttgggaagctgagacatgagaatcacttgtacctgggaggtggagattgcaatgagccgagaccatgccactgcactccagcctgggcaagagagtgagattgtctcaaaaaaaaaaaaaaaagaaagaaaaaaaagaaaaaactttgacaaccttaagggataaaaatagatctggctgtagttttgacttccctagttactaacatggttgggtacctttacatattttcactatcaatttgaacttttatttaagtgacttgcctgttcattatgatattttttctattatatatattttttattttttgcaatatgtattgttggggttgcctctctctgatttctaatcctttggttttgttcacacagtgaaacattatttatgtcacatatcgctgatagggatattcagctgtgtgggcacttttgttgtctccaaggaggtaaaaccttaccatagtcctaactgcagtatcacataaagggtctgaacacacacgtgtatggattctaatgttaagactcttgctattcttcaaacccttagatccctgtgttgggttggctgttattattgacttggcatcacaacaaccccctctaacaacttgtctgtattgaagaagaaaagcaagcatctacccatttcccaggatctccctcccaatatggttttacattacagacaacaatggaggagactgttatataatatttagcatgtggaagacaatgagaagaaaagatccaacttaaaatgggcaaagaatttcaacaggtagtcctccaaagaagtgtccggtacacacaaatggctaatgtagggtcctccagttaccctctctttctgtgtcctgaccaaaaatcacagagtgccttgaccactctgtgacccagccagctgcacattttttttccagcaggcttgaacccaaaccggggccttaaacattcccagacattgataaaggcatctaggttgttgcccaaaatactgaaagaaactggccctggccctggaccaaattccttaagcccccataaaaactccataccctgattccctcgctgtgaacatacctaggtagaatgacccttttctttcactgtccatcacaagaattgcttgcagccctctttaagttccactactaaatgttttggactgatcacactggcatttagtgtttctttctttagaatcccaaccagccccatctcaggatggtttgggggtactccatggtgggaactcccctgccactgcttttggggcaattccagccatgggtttggtgggatgaaccagctaaatagcacatgaaaacacgctcaatataatttcattagggaaatgcaaataaaaattgcaacgtgataccacttcacacccactagaactcctgtaatgaaaaagacaagtaataacgagggttagcaaggatacagagaaacgaactgccatacattgttggctggaatgtaaaatggcgcaactcttttggaaaacaactttctcatatacaattttccatcagtctttccttttctctctttttgccctccacagacttccacctcacatctctaaactctaccctctgtaattcccacctctcttttcaggattttaggatcaaatcaaccatgcttttcttacacccctaaaagaaattacattacctagacccaaatcagtctgaaatagaaggcactcgaattgttgtttggagagatctcagagtggattcctatagccatactcttgcttttactctcaataatcattattagtttttggcagtacttatggtaagacaagtaacttttaattctgttgaaaccttaactctgggcctctatagggcatcattgtctttgcaaacatttactgtacacctgtaatgtataaagcaccatatttactcttaaggagttcccactctactgagctaaaaatgctataggactgtgaggggaactaaaaaagcaaaacaaaccaaatccaaaattagtaaaaagaaagaaataataaagatcagagcagaaataaatgaaattgaaactataaaaacaatacagaggataaaatggaaagattttttttgaaatggcaatgttcataagcctttagctagactaagaactgtgagaaataaggacaaaatattagccatatctaaactgctattaatcccatctgttaattttttttttgagatggagtctcactctgtcaccaggctggagtgcagtggcgtgatctcagttcactgcaacctccgcctcccaggttcaagcgattctcctgcctcagcctccctagtagctgggactacaggcacaagccaccacactcagctgattttttaatatttttagtagagatggggtttcaccatattggccaggctggtctcaaactcctgacctcgtgatctgcctgccttggcctcccaaagtgctgggattacaggtgtgagccaccgtgcctggctcccatctgttaaattcttaatgtcagtcattgtgttgagctttctaggattttaaatttttatataaccattttttaaaaatggatcttttaaatgccacactaagcataaacttttcaaaaacagaaccaagtgattacttttagttttcatttattttctttaatcagttgttttaaagtttgtgcccgctaactccaatatctggatcatctggaagtccgtttcaactattagaatatcatgcttatgtacagtttcttttgcctgcagtcttaaggaatctactcattccccaagtttgaatgtttatattgtcttttgtttttgttttggcatttggccaattttctggcaagccccattaatttttgttgaatgccaggtattttgtataaaaaatggtgttgactctagataatgtaatcttccttcagaggatctaagttttcttctggcagacagaggacaggcatatcacaaactttactcacatgatgttgtgatccattatttttgacttggagaatatgaggattttcattttcggcaggacaatgagccaatatagataaaatttaaaacacgtctattcactcaacaaccacacatttaaatgttctatggagatgatgaatataaagagatgaaacttatttttctctggtttttattgcattgtggtttagaagagtgaaaaacagtaaacaggccttcaatagtaagaaattggttaagtaaaaataacacattaatacacaagaataccatgcaggcattaaaaattaggttgtaggtcatttaaatttttttctcagtttattgttttgtttcttatttttatgataatttaatacatttatgtaatttgtaaaaatcaaatcagtgtacttggaatatccatcacctgaaatatgtgtcctttctttatgctagcaccattctaatgcttctcttctagccattttgaaatatacaatagattactgtaaactatagtcaccctactaatctactgctaggtcttatttcttctatcaaaccatatttttgtacccattaatcaacttctcttcatccctcctccctactacccttgccagcctctggcaaccagcaatctactctctatcttcatgagatccactttttttagcttccatatataattgagaatatgttatttgtccttctgtgtttggcctatttcatttaatataattactcccggttccatccatgttgctgcgaaagatggtatttcattcttttttatggctgaagaatattccattgtgcatatatacaattcatccattaatgggcagttaggttgatttcatattttgcctattgtccatagtgctgcaataaacatgagattgcaggtgtctttttgatatattttctttctttgaatatatacccagtactggaattgctggactgtatggtagttctatttttagtttttaaagaaacctccatactattctccatagtgattgtaccaacttacatccccaccaacagtgtacaagcattccccttttgccacaccctcaccatcatccattattgcctgtatttttgataaaagtaattttaactggagtgagatgagatctcactgtggttttgatttggatttctctgatattgatcatttttttccttatacctgttggtcacttgtatgtcttcttttgaaaacatctattcagatctgttgcccattaaaaatctgattatttggcttttttgctattgagttgtttgagctccttatatattctgggtcttaatccctggtcagatggtcagtttgcaaatattttctcccattctgtgggttgtctcttcactttttaaattgtttcccttgctctgcagaagattcttagcttgatgtaatccaatttgttaattttcactttggctgcctgtgcttttgaggtgctactgaaatctttgcccatatcaatgttgtgaatcatttccccaatgttttcttctattaatagtagttttatagttttaggtcttatatttaagtctttaatcaattttgatctgatttttgtgaaggtgagataagggtctagcttcattcttttgcatatattcagttttccctgcactattaattgaagagactgacctttcttccattgtatgttcttggtgcctttgtcaaagatgagttaactataaatgcatggatttatacttgagctctctattcttttccattggtctatgtgtctgtttttatgccagtactatgctgtttcagttgctgttgttttgtagtatattttgaagtcagatagtgtgctgcctccagctttcttacttttgctcagagttgcctttggctatatggcatcttctgtggttccatataaatgttagaattgtttttgtctatttcagtgaagaatgtcattagtattttctttttttaaattaaattaaattaaattaaattaaatttatcactattatttttcttgagaaggagtcttgctctgtcgcccaggctacagtgcagtggcgcaatcttggctcactgcaagctctgcctcccaggttcacgctattctcctgcctcagcctcccaagtagctgggactacaggtgcccgccaccatgcccggctaattttttgcattttttagtagagacagggtttcaccatgttagccaggatggtctcaatctcctgacctcgtgattggtctgccttggcctcccaaagtgctgggattacaggcatgagccactgtgcctggcctgtcattagtattttcataggaatttcattgaatctgtaaattgcattgagtaatattgtcattttgacaatattaattattccaatccatgagcatgggctatctattttttgtgtccttttcaatttctttcatcagtgttttagagttttccttggatagttctttcactactttggttaaactcactcttaggtattgtatattctttgtagctattgtaaatgggattgctttcttgatttcagattgttcactgttggcatatataaataatactgattttttatgtttattttgtatcctgcaacattactcaattttcttatcagttctaatggtttttgatagtctttagtattttccatttttaataacatgtcatctgtcaacaagactaatttgacttcttcctttccaatttggatgccctttaatttctctgggaactggagtgctaaagttttctcagtgttcctcccacctaattgttctatgcaggatttccagtactatctatattgaataaaggtggtgagattaggcatccttgtctttttcaagatcttagaggaaaggccttcaattcttccctgtcagcacaatgttagctgtgggcttgtcatatataacttttattattctgaggtatgttccttctacacccagtttgatgaggatttttatcataaagggatgttaaattatattgaatgtttatttttagcatctatcaaaataatcagatggtttttcttcttggttctgttagtgtgacgtatcacacttatcaatttgcatatactggatcatccttgcatccttgggatgaatcccatttgatcatggtgaatgatctttttaatatgttggtgaatgatctttttaatatgttgctgaattcagtttgctagtattttgttgaaaatttttgcatctatgttcaccagtgataatgtcctgcagtttttttttccattgtgtccttttctggttttggtatcaggatactgttggccccatagaataaatttggaattattcccttctcttcaatttttgtgaagagtttgagtagaattggtattagttctctaaatgtttggtagaatttagcagtgaaaccattaggtcatgagtttttccttgataggcgactttttattatggcttcaatttcattatttgttactggtttatcgaggttttctatttcttcatagttcaactgtggtcgattgcatgtgtccaggaatttattcattacttctaggttttccaaagtgtatcattgttcatcacagtctctaatgattcttatttctaatgattcttatttttgtggtctcagttgttaagtctcctttttcatttctgatgttatttacttggatcttctttctttcttggttagtttagccaaaggtttgatgatttctgtttatctttttaaaatcccaacttttctttcatttatcttctgtattcttctttcattatcaattttatttatttctgctctgatctttatttattttcttctactaattttggatttggtttgttcttacttttttagttccttgaggtgcatcattaggttgttatttgaaatctttttacctttttgatatatgtttgttgctataaacctctaagttttgctttggctgtatcccatagattttgccatgttgtatttctattttctttgtttcaaaaaatgtttaaatttccttcttaatttcttcattgcctcactggtcattcaggagcatgctgtttaatttccatgttgtttgtgaagcttccaatgtcctttttgttattgatttctagtttaattatactgtggtcagaaaagatactgaatataatctctcttttttttttaatttgttgagatttgttttgtggcctaagatatagtctattctggacaatgttccatgtactgatgaaaagaacatctattctgcagcaattgggtgaaatgatctgtaaatgtcagttatgtctattaggtctagtgtgtgacctaacttcaatgtttctttgttgattttctgtctggatgatctgtccattgctgagagtgggatgtcaaagtctcctactattattattttgccatatatctcttattttcgatctattaatgtttgctttataaacttcggagttctggtgttgaatgcatagatatttataatggttatatcatcttgctgaattgacccattaatcattttatagtgaccttatttgtcttttttacagtctttgatttgtagtctatattgtatcttatacaagtatagctactcctgctcttttttcgttgcctgttgcaagctatgtctttttccaccccttcacttttagactatgtgtgtctttacaggtgaagtgggtttcttgcaggcagcatatagttgggtcttgtttctctatccattcagccactttatgtcttttaatcagaggatgagtcaatttacattcagtgttattattgattagtaaggacttactactgccatttgttgcttgttttctggttgttttgtaactcctccctttctttcttcctttcttactgtcttctttttttgcttaaatatttaagagtcttcatttttctgtcttcctttgtggttaacagtatgttttaatttgttgctttttacttttagtgaatctattataggtttttgtattgtgtttaccataaagcttacaaaatacattttatagatataacaggttattttaaagagatgacaacttatcttagattacaagtaatagaaacaaagaaaaatgaaaagaagaaacacttctacacttaactcccatccgtcccaccttttgatttttggttgtctcaatgtacatatttttatattacctatttcttaacaaattgctcttgctattattctttttgatagatttcttttgggctacatactagttatgagtggattgcacatcacaattacaatactattcttggtttgtctgtgtacttaactttaccactgggttttacagtttcagaagctttcattttgcacattagtagctttttctttcacattggaaactcccttgaacctttcttagaagtctgttgtggtaaattctctcatcttttgtttatcttggaaagactttatctctccttcatatttgaaggataactttgctagatacagtattcttggatgatagtttttttttttttttaatttcagcactttgaaaatgtctctgcacttcctcctggcctatatggcttctgttaagaagtcttttgccagatgaattggagctcctttatatgtcatttgcttgtttttttttttttttttttttttttttgctgcttttataattctttctccttgacctatgagagtttattatatgctttggggtagtcttagttgggtcaaatctgtttgctgttctatgatttccctgtacctggatattcatctctttcttaaattttggaaagttttctgttattttgttgaatatactttctactccttgctcttgctcaactccctcctgaacagcagtaattcttagttttggtcatttgagatattttctatctctttcagtcaatatttgctctttttctttctctgttctcttctgactgtgtattcacaaatagcctgtcttggagctcactgattctttcttctgcttgatacattctgctgttgagagcctctaatggatatttcagtgcagcaaacatatttctcagttccaagatttctgtttgattttaaaaaattattttattctctgttcaggttctctgatacatttctgaattgcttttctgtgttatcttggagatcactgagtttccttaaaacagctcttatgaagtcttggtcagagagttcacatatcgtcttcctgttaggatcagtcactggttccttgctttgtccatttgtgggatgccatggctccccgtttgctgttgttgcttatggatgtgtgtctgtctttgcatcgaatgattatacattccactattctctgtctggctggttttgtttttcattggatatggctccctagagattctttatattttacctgttgattttcttctttcccgttaggttactgactcctttttggtactagatagcctattaactccaggtttgcctcagttctagtaaataatcatagtgccacccatcccaaaaggggtaggtcccataggggatatcctagttgtaagaaagctggctagtggttcatgattggggacctacagtatagtgatgctgaacagccactctgattgttgtctcctttggctgagttgcagagtagagtttccatgacggggacagtattcccacctccctcctttgtctctggctgtcctcagggatatttctctcttcagttactcctgatgctttctgtgggttgagtcagggacaagtctcctgccaggaaacccaagatggggaggaggctggttgtccaccttgattaactttttccagtatagaaaccgtgagacgggaaaattttccacagtcttggcaccaggcagattagggggaagggcactgtggataggaaagtccacttctcttatcatctgctcagttttttccacttatttgtgtcctcaggaactgtctccttctatttgagttctgggatattgctggtgataatcttggtgctgtatatttgtctttagttttctattgaaaggagtgaagccagcttgcttctacattgctatttttggaaccagaatttaatttctactactgacttatgagatgtactttaaaaaattcttaaatggttactctagggcttaaaatatattcctgtattttttcacagtctatcttcaaatcatattatgccaattcatgtatagagtacaaccatatacctctaatttctgctagtatatttctaatttctgtcttccctgttttgcagtgttcttacgaaacatcttatttttgtatgtcctctaaattcataaaacctcattcctaattttgctttactgaattatattttggagtaataaaaataaaaattattttacacttaaaatgattgaaataactattttcatagttatgtcttttggtagatccaagtctatttctggtatgctaaatatctcttacagtgcaggtctgctaacagtgaattctatcagcttctgttcatctgaaaatgcctttattttgcataccttctgaaagattttttccaccaggcttagatttttgattgatcattttttttattgttgtttctaaatgttaaagatgtaactccattgtcttttgcttgcatggtttgtgatgataagtctgatgtttttctcactctgcttcttatatgtaatgtgtccctttcctctgtctgccattaatattttctttgcactgtccatccatttttagctattgggcaataatacctctagttttgttctttttttaaaaaaatactgctttggtattctgacgttcttgaatctgggtgaagtcttattatttttggaaaattctcagccattatctctttaaatatcttttcttcccattctctcccccgaccctgggtttccaagtatgcaaatattagatcctacaatgttgtcctatttgtattgttttcttcacactttttctttttgtgttttagtttgcatgatttctattgacctatattcaagttctgacacttttctcaactatgttgagcctactcataagtccttcaaaagcattctgataaaagtaaaagcagtagcataaattttcttttcctagcatttcccatttgactattaaattttactgaaatccctatctgctcatgcatattatctgcccttttcactggagtcttcagcacatcaatcagttatgtaaaattccctaatagttccaaaatatggttatctataagtgtggttttattgattggtctgctatctattggcagaagattgttctcaacttttgatcttgtgtttttaaaataaaatgccagataacatatacaaaacagtagagactgaagacaacattattttttgcctaaaactgggcacacatgttctgctaggatgtcagggtggagtgctgaattaatctggtcaggaatcaagctggaattgggttttgttgttgcaatatttatcttagttgtaccatggcttcaaatttctctagtgttaccttgtgcttagggtgggaactggagtgctaaagttttctcaatgttcctgttgccccatcctcagcttttggccatcccttggcaccagggccaagaaagattctccatgttcttcccttttctcacggtagcctgctgttgcttctcactaggaataggctaggggaccagcggtgtcctttgttgtcttggttagtctcagttgttagtgggaattggagtgtcagagattctatgcattttggggagccagaaccacacaggactaaaatggtacagaatatctcttccttcggctgtgaaaagaaagcaggtgatgctgctatattgtgaacaacatgaagacaagaattcacaagaaaagagaggtgagagaattaaaagaaagcaatataaaatccccctaccttacccagaccctagtcttacactatctgtatcttttcatttatatgaactaagaaacagttttggtttaggcaactctaaattttctgttacttagaactaaaagcattccaattgataaaaccaccatgagctctcccctgtaagtgatgatatcaaagacatgctttagaagccctggatttctgatgatactgtgcaacttgaaccagcacctcaaaagccaagttatgccagtgctttggtcatcatattcatccagcaaggggaaatctgatggaaaagccgtgagcatcaatttataaaactggattgcactaggacatcctaggcaacatggattttgagacctaaggaaatttcacagaaatataaagttatggacacctaatttatctgtattcttaaaaatccaggaaattttaagaactaacttcagggggtttattctttactgttgttggtcataatgtcatacagtgaaatcaagcaatcatatcatgagttcttaagtataagagataatatatcaatagctgtttactgctttggtgtaattggtaaatgtccattataaatatttttaaataaagcacagaaaaactaagccaaaaatttctttccagagaaaactactgtggatataataatgagtaatctttcacacattatctataagcatatatttgaacatacatgcacacaggcttaaattagctggctattatgaacgtacagtccaggtttttactaaacaatatgcatgatccattcttgtcattttagagctaaatcatactttctgtagatccatagtatagaacatacagaaacttacccaaattcatattgatggacatttacttccagcttaaaacattactatcattgtaaaatcctttcttactgctaaaattgcttaattataaattactgttctacgatttccagatcggtatgcacattttacattccgatatatatggggggcttgataagtattttgatatatatagaacgacaagcttgtatttttcactttcgccaacaaaatgcatcattcttgaagacagacactagcaagtaaatggcaaccctatcctgctagtcaatacattgataaatatgcttagaaaaattcaagattttccctttttttgtgtgtgagtgggagaagtatgggaatggaaaacttgacaaaattaaaatctttcaaacttgaccctgcttaaggaggtgtggattggacaaaggctacaacatttagaaatcagtcagatcaaatggacttttagagaaatatggagaataaaaaaaccccaagtattgtgattttgacatttattaaaaagtatttgtcatcagtaaccattttggatacttgcaaatattacagtaaaactctgccttaattcacagggcaggagtagaaaatcaattatgtaaaatacagtgttccatttttgcaacattaaccagaaacattgtttatcagtttgtactgatatttcaagtgcacacatgggtacatatacacacacacaaagctaaacttcagcagatggtataatgtatagagaccaaacgttaagaaatgcagcacatctctgctcaagatggaacaaagggtgggaactaaccccaatagggttacaatcaaattaatgttatttcagatcatcataatgcttattgttctacatttcaaatatttacttgaaatgattttattaagattacttgcaggatttctcctccaaatacattttaagttttaaaaaatgcgcttaaaaatttcaaaccttttacctttacatacttttagttatttagcaaaaagtactgagcacctacattgcgttatgaaatgtcctagttttgtagactagcaatgaacaaagtcccttctttcaccaagcttacattctagagaacatggatttaggcatgctcatcactgtacttttattaaattcctgaccatactcatattttataagccttagctcctgtgcaatgactgatgttaaagttctaacaaaatccctcgtgaaacccctctcattaaatgtctctgttgtgtggtctcctggccattatgaatgttgaagttgggcagcaacattacattttaatttttaaaaattctttttctactgaaagaactctagtgactggaaaatttcagctcccatttgaggacttcaaaacaaaacagaatcttcatttctgtgtagattctctgatgaagggtagtccttaccatagtcttcgcttttatagaatttatcactactatggactctttgatgaatgagaagacctgagctccaacggaaacccttaccacatgcatcacatttgtatggtttctctcctgtgtggactctctggtgagcctgaagatttgatctctgactgaagccctttccacatacctcacatttgtatggtttctctcctgtgtggactctgtgatgggcttgaagacttgaatacccactgaaacccttaccacactgttcacatttatagggtctcccttccacatgaaccctttggtgtgcttgaaggcgtgaactctcactgaaaccctttgtacacacctcacatttgtatggtttccctcctgtgtgaaccctccgatgtgcttcaaggcgcgaactctgactaaagcccttcccacacatctcacatttatacggtttcactctagtgtggactctctgatgaccttgaagatatgctctctgactgaagccctttccacatacctcacatatatatggtctttctccagaatggacactctgatgactctgaaggtatgatctctgactgaaactcttaccacactcatcacattggtatggcttctctcccgtgtggaccctctgatgggccaaaagtgttgaggccttactgaagcctttaccacattcttcacatttatagggtttttctcctgtgtgaaccctctgatgaatttgaagattaaagctccaactgaaccccttcccacattcctcacatttgaatggtttttctccagtgtggactctctgatggccttgaaggtgtgaactccgactgaagcccttcccacactcctcacacttgtatggtttttctccagtgtgaactctctgatggccttgaaggtatgaatttcgactgaaccccttcccacattcctcacatttataaggtttttctccagtgtggactctctgatgggcttgaagatatgaactccgactgaatcccttatcacattcctcgcatttataaggtttctctcctgtgtggactctctgatgaacattcagaactgatctatgattgaaacctttgccgcatatattgcatttgtatggcttctgtccagtgtggactctctgatgatctttaagttttgagctccagttgaagccattcccatgctccttacgtggtttctctccaatgtgaatttttggatgaccttgaagatataaattatggctgaagctgttactacacacatagcgtttatatggttgttccttagtgtggactatctgaaggtcctgaaaatgtgaggccagactgaagccattaccacactcctcagaattatatgaattctcttccatatgaaccctatgctgaatgtcaagatttgaactacaaatgaaactctttccatactctatatctgtgtatagtttctcttcagtgtggattttttgatggacttgaagacatgaactctgattaaagacattctcattttcctcatattcatggggttcatccctagtatggaccctaaaaatactattaaggtctaagctatgactgaaggctttctcataaatgttgtgcctataggacatctcacctgtgtggataagttcataagtgttaagaggggaacagtgattgaagttctcaccatattcaccacatttgcatggtttctcctctgtatgcactctctgataggatttcagatgtgaattctcaatatcatcttctctctcaatattttgatgaatatgaagaagtgaactataattacagccctttccacatgaactgtatgtatagggcttcccttccaagtggaactgctgatgaacctcagagctggagtcattactgaaggcttttctatacccagtacatggatagggcttctcctctgtttgaattgactcctgattaagtaatgataccttcatgatatcttctccacagtcatggcagctgtagttttcttttctgtgtacttccagtttatcattgtgatgtgagagccaactgacactgtcacacttacagaaatgatttttcatggaaatttgctgacatctacactgataattatgtgactctttcagatacattttcctccaagaatgatgtgccctccaagatggatacccttgactttttatataattggagccattccctatatgagtgaatatatagttcttatcttcagaaatctgaactggtattcctgcccaaacctggccgagggaattaccttgttcttgcaactgagaattcttcccttgaaaaactttcaggaaatcttgacacctgattaacccacctgcactttgttgccaggtctgacgggaggaaagctctttgggggaaaagtagcttactgttacttcctgaatactctccatcttttgttgattcttccttcctataaggataaagagaattcagatgtgcacgagtgaatgctttattcaagagatttgaagattttacacttaggtcataacatgaaacttgaatgaaccagaggaaaattcatgccactatttctaagaatacttagaaaatatctcctctttggctataccagttacaggttgagtattctcaatccaaaaatctgaaatgtgaaatgctccaaaatccaaaacttttttaatgttctacatgatgttcaaaggaaatactcattggagtatttcagatttctgattagggatgctcaactggtaagtataatgcaaatactctaaaatctgaaaatatttgaaatacaaaacacttctggtcccaagcattttggagaagggatatttaacctacatacaaatagcatctacataattcaggatatctgatgcctcaaaatcaggactttgcagcacgacctggacatcgaacatgatggctgtgttcaaaaggcttagtaaaaccataaacatggctgggcatggtggctcatgcctgtaaccctagcactttgggaggccaagtcgggtggatcacctgaagtcaggagtttgagaccagcctggccaacatggtgaaaccccatctctactaaaagtacaaaaattagccaggcgtggtgttgcacacctgtagtccccgttactgaggaggctgaggcaggagaataacttgaacccatgaggcagaggttgcagtgagctaagatcatgccactgcactccagcctaggcaacagaatgagatcctgtctcaaacgaaacaaaacaacacaactataaacatgttatcatggattaatcatgggtttccaggagatctgaaggggaaaagaggatgttcttaaaactggaaaaatatagttgcaaatggacaaacgccttttgtcctaataagtttttcttttttgtctggcacataaacatgataatgttgttcatttgtaagtgtactgtgtgcgttaaatgatatgctgaagaaggtaaatacagacttttactttatgtttgaggcatcacatatcctgtcactaatgagctatttatcctcatgagaataataagctcttcttcagattatgagactaacgcgctgccagctgcgctaagagggcttagagaataataagctcttctaagtccctgtaggccattacagattttaactcttttcaaaagatatttcacaattatcaacggccatggtgtaggtcaaaatgtgaaagactgtgacagaattcaactaaaaaaatcagaaaaaaattatggcacctgtaggtgtcctctgaggtgctcattagccaggaacagaactcaatgaatactgacttttgcttgtgccattttactggaaaattatgttagtgtttaggaaatttgaggcaccagaaagggttgaagacaggatatttgggtagaaatagttacctagttattaaagctcagattataagcagacagcagatcttcatatactagtgacaaatatcctccctaaggacaactggttaaacagggttgaattaataacatgcattcttctaacacttagaagtagattaagtctctataatatccagaagaaaagcagtaaaagggatgttttttcatgaatattaccctcaaacataattctgccttatttctttgtgtttgtctgcctctccacactggaatgtattatccatgaaaacaaacactgttttgtgcactgcattcctttcactgccaagtgaacagtagttgctcaataaacattgatgaataaatcatagtttgagttgctctcactcatagaactaaaagagcatgtaatgtagctttttaaatgggaaaggaactggtgatggtggcaactttgctggaaagctgaaaggctataggagacgtagggcgacaattcagagtgatactgctgatgagaaaagcaaaggtcacaagaatctactgtggatgaaataaaaatgtaagatcaaaaagacccataggcagggcctgtggattgagtctttctcatttttaaagtaactttttaaatggtacaactgtgagccaggcatggtgacgcaatcctgtagacccagctactcagaaagctgaggcaggagaaatgcttgagcccaggcatctgaggatgcagtgacctattaatataattgcacctgtgaacagccactgcaactccagcctgggcagcatggcaagactctgtctcaaaaaaacccaaaatggtgtaatttttcttgaacaaaatcttacccgtaagccctaccctatcccaacttttaaaaaaggaaaaaagaaaaggccacactgatgaatctgtatcactaggctctggggcagcacactgattgtgggataacacttcaaggtatatcagtaggtatgcatcttggtactttaaaagcacatttactgatgtctttgccttctcaaaagtgaagctttcagttattataatgatattttatcatataatgatgaaatgaagggatatattataggaggcatatcagataaagtatatagcttatatgtgagaagtttgagcttccagctagggttaatcataatccttgtagttttgttttactattataaaaaacactcaatatacatccataaagatacagtttaatatgtcctgtcttttgggactgatgtagtggcttgagaacatgaaagtagcttgttagtcaaaacccaatttctcacaaagcaactgtttcaatgcaaattagtacataattcatgatataaaaatctctcaaatatatgagattaaagtttctctctgagcagtgggttttgcaatgttaaggacatagaggaagaaaaaaaataaaaggtcatttcactttgtttcacactcttctaaaaaagaccacacatgtaacaacattaatttcctttagtcaatggtatagaccgaaacaccttgttactttatttaaataactcaacatttaagttctatttcaatatcaatggtagaatggtaataagaaattgtgttaagtttataaatgaactttatttgatggagaaactaagcatgacaaaagatgccgaagacatcatttgaggtaagaaggttgagaatttattacatcttcatagcaatcctgctttagcacttagaggttgagaaagtcaatgattcaagcaacccaaattgatcaattcaataacaaaggtgctatatttgtcataaagacaagtaattcctttgaatttaatagttagctataatgaactcagagaaaaaaaatctttgtttatgtcttcttcttcttcttctttaataaaagctaagcgagaacatcagctcaggttacccaggctgagatcaccttccgttcttacttcgcttttagatagagacaatacaaggtatagtggtgacaatgttttgatcacaaatatttaagctgctgtgctgactcctttcttaaccactgatatggtttcgctctgcgtccccacccaaatctcatgttgaattgtaattcccagtgttggagttgaggcctggtgggaggtgattggatcatgggggtgctttctaatggtttagcaccatcccccaagtgctgtctcgtgacagagttctcaagagatctggttgtttgaaagcatgtagcacttcctgccctctttctcttcctctttctctgccatgtaaaacatgcctccttccccttcaccatctgccatatttataagtttcctgaggcctccccagccatgcttcctgtatagcctatggaaccatgagtcaattaaacctcttttctttataaattacctggtctcaggtagttctttacagcaatgggagaatggacgaataaagaaaattggtaccagaaaagtggggcattgctataaagatacctgaaaacgtggaagtcactttggaaacaggtaatgggcagaggttgtaataatttggagggttcagaagaagacaggaagatgagggaaagtttggaatctcctagagaattgttacatggttttgaacaaaatacggatagtgatatggacagtgaagtccaggctgaggtggtctcagatggagatgaggaagttattggggactggaactggtgatatatttagatatatttaggtttgtaaatgcatttatacattttcccaacattggtgctatgctttagcaaagagactggcagcattatgcctctgctccaaagatctgtggaactttgaacttgatagggatgatttaggttatctggtggaataaatttctaagcagcaaagcattcaagatgtggtctggctgcttctaacagcatatgctcatatttatgggcaaagagattatctgaaactggaacttatatttaaaaaagaagcagagcataaaaatttgaaaaatttgcagcctgatcatgtggtagaaaagaaaaaccaattttctggggagaaattcaaggctgcagaaatgtgcctaagtaaagaggagctgaatgttaatagccaagaaaatggggaaaatgcctccagggcatttcagagccagtcatgacagtccctcctaccacaggcctgaaggcctaggagggaaaaatagttctgtggctcaggcccagggccctgctgttttctacagctgaaggacacggcaccctgcattgtagctgctccagttccagccatggctaaaaggggccaaggtatagctcaggccattgcttcagagggtgcaaaccccaagccttggcagcttccacgtactgttgggcctgtggtgtgcagagggcaagagctgaggcttgggaacctctgcccagatttcagaggatttatagaaacacctggatgtccaggcagaagtctgctgcaggggtggagccctcatggagaacctctactaggtcaatggagaagggaaatgtggggttggagcccccagagtccccactgaggcattgcctagtggagctgtgagaagagggccaccgtcctccagaccccagacccaccaacagcttccaccacgtgcctggaaaagatgcaggcactcaacgccagctcatgaaaatagccaagtgggctataccctgcagagccacagaggcagagatgcccaaggccttgggagctcatcccttgcatcagcatgcctggatgtgagacatggagtcaaaggagattattttcgaactctgagatttaatgactgccctgctgggtttcagattggcatggggcctgcagcccctttgttttgcctgatttctccctttcagaatgggggcatttacccaaaggctgtagccccattgtatcttggaagtaactagtttgtttattagagtattatgcatccattacaaaaacaagagttataatcttagactgggagggatttccccaaggtaacggcaaagaagaaaaattagtatattaaaaacaagaatgtacataacaaatttttacattaatatgaggtatatgatcatgttagtataggtaaaaaaattaaggtattttaaaaggtgacattatgttccagctgacagtatcaggaaggtagactggcacagcatggcctcggcctgtttctgtacaacccaggagccaagaacgctttctacatttttaaagtggtgtaagaaaaacaaagactgtgacaaagagcacatgtggccaggaaaatctaaagtatttactacttggacctttagagaaaaagtttaactcctactctcaagggtaccatgtaggaccctgaatcttaaccaagatggaaacaaaccattatagaaatgagttaatttgttttgaattttctgttgactctttcttcttatccagcagcatccttagctacacagttgcgacggtggcttttgatgtcagtcttgaggactcaagaaactatcaaaatgtttggattcacataaatgtccaacttgaagattctactttaagactgtggctatgtcaagagattgtttgggtgcgagagtatgggacagaatgggaggataagaagatggacatatgaatacaagggtgtctcacttgaaaatgctgcatgaggaagaccagttataatgttggcattggtcatttttgatacttactttagctgattggctattcttatcttttaggattaatggctacccatctatgaatactcaaggacagctaagcagttaaaacaggcatccatcagatgagaaacagtattctagaatacccttcaattacacagatttattctacacctattagctgcctcagggtgaattgaagagagcaaagatcatgcatctattacccaattcattcagagagaaaagcaagtcaaggaaattgacacagaagcataattgagaggtctgagggggcaatcatggggcagtgcctctgaaacagactgaatgagcaaaaacaaacaatggtaggtgaatatggaaagtgagaagaggttgaggggacagataccttaggacctaatagaccactttaagtactttaaacttactatgtgtgaaatggggagccacaggaaagcttaaacagagaagtgatgtgttctgactcatgttctagaaggggctccctggctgctgtgttcctgcagcacagttctcacctgaacatccatctcttggggtttctgtctccaccatcaaaagcttttcttctctctccagctgggatattaggtctggcttgaagggctgatgtgctgtaaagaaggaaaggacagcaaaagtttttaagtttgatgacattcaattggtcaaaactagacaaaaaggtatacacagacaagtgagactctctcccacatcccttccaccctgttaccttccactcactataagaaactaacttcatgattttcttttttttttttttaaataggctctcacttttctgcctgtgccagcatgcagtggcatgatcacagctcactacaactgcagcctcaacccctgggctcaagcaatcctcccacctgggcctccagagtagccgggaccatgggtgtgcatcattatgcccagctaaattttttgtagagacagggtctccctgcattgcccaggctggtcctgaactcctgggttcaagcaatcctcttgccttggcctcccaaagtgctgagattacaggtgtgagccaccacgcctggccattattttcattaaaccttccttcttgtgtttcttcttataaaaataagtatatatataaaatatatattatttttatatattacatatatttttatatatattatatatatttcatatatgtataaaatatatatatattttgtatatgtataaaatatatatacattttgtatatgtgtaaaatatatattattatatatattttatatataataatatatataatatatattttatatataataatatatattatatatatatgtctgtacccacacactgtctatttacttattttaccttatttcttacatgaattgtagtatactattaatattcttttggacatggctatttttagggaaaatccccagaaatgggttgccggggaagggtaaatacctagctttgttagatattgtcaacttcccctccctaagggttgtatcattttgcattcttcctttcaacgcatgaatgttcttcattccccacagctttgccaaaaaacgtatagtgttacgtttttgaatttttgccaatttcatgggtgagaaatggcatttcagtataattgtaatgaacatttcttttgaaataaactgaacatctattcatatgtatacatatttctatgtgtgtatatgtgtatgtatatacatacacatacacacacacacacacacacacacacacacacacacaccctagctctatgtcctgagacaaagaaacatagatcatagatactacagtgaccatacctagcatccagactttggcattaaataccattccccagttaaaaaaaaaaaaaaaaaaaaagataattccagagccaaggcaaagtaaagatgagcacaaaatactgttctctgccaacaaagtaagaaagtgctcaaaaaaaaaattggggacatgttacaaggtcacaggagccagcttaaagaggccaaacttgggacaattttaacatctaaaaaattacagtaataaactataaacctttaaaaaatttcacaaatccctacaaataacattgaaatgatgcttgagaagtggggggctcttgttgactgcaagtttatgccaggtgctgactgctaaatgggaaggaggtaaagttagaaaagtcatcattttgtaactgtcatggtaaggaccagataaggcaagatcatcagcaggtgcttaatctacaggaaaatacttgtgttacccgatgattacaaatggggaaaaaagcagtaattatatagtggggaaactgcataacatcgtgactgggtaatcaaagttaacaccacctttgagggacagatgacttcacgtgcctccagatgtgattccctcaaaagtgcacactctacctacatagtgttcctgctgcatggatcatctgaatctaattttgtggaatcattaggaatgttctattaaaaataagggaagaggtgatagcgttcttcaaaaatgttactgtcataaaagagaaagaaatgctgtggaaatgttctaaattaaagaaggctaaagagacagaacaactatactagactctagatcctgttctggagggagaaaaatatgctttaaagaataaaattaggctggtcgtggtgactcatgcctgtaatcccagcactttgggaggctgaggcaggtggatcacctgaggccaggagtttgagaccagtgtggccaacatggtgaaacctcatctctaataaaaatataaaaattagctgggcatggtggtagttgcctgtaatctcagctacaggtggctgaggcacgagaatcacttgaatctgggaggcagaggattcagtgagctgaggttgcaccactgcactccagcctgggcaacagagtgagactctgtctcaaaagaaaaaatatatatataaaattggctttatggataaaatcacagcataaatgatagataagataaaaacattatatctgtcctgagaacaggtaagagaatattcctctttttataaaacagactgtgcagtaaaggaaagagttagttttgtttaaagagagatctggattttgcctttggcttctggagaaggtaatcgctaagtccctggaatatactgcccgattagagtgtctttcgtttacccagaagccttgggccacacaccagatagttaaacaatgtgatttatagtaggggctttgagccatgtggtattagcttaacctctggagaaactggaatctaagagcagccacccaggtggtcaatcatatctaggtaactaagctccagtaaaaactctggacaccaaggctcaaatgagcctctctggctggcaatgctccttacgtattgtcatacttcactgctgggaagtcagtgctgtccacaactccacggaagatgacaagtggaagctgacatctggaacgctcctggactctgcctcctgggcctcttccctaggctgactttaatctgattcctttccctgtaatgaatcattaactgtgaagacaactgctttcagtgagttctgtgagtccttctagtgaattattgagcctgagtgtggggctcagtactcttgggtcttggggactcctaatcttgcaattggtatcagaggtgagagtgaacttggggactcctgaactctgtatatacactgaagtatttagagaaaaacggccatggtatattaacttaccctcaagtcgttcagaaaaagatattatgactatatatattttttcatatacatacataagtatgtatggagagggaaagaacatgaacataaatgatagagcaaatagggtaaaatgttattagaggtgaatccaggtagaatcttggcgaatctatatgggtgttcttgtccttttgtaagttttctgtgagtttaaagttatttacaaatataatgtttttttaaaaaaacccctctaaaaagtcaagttcatcaacagttactggtgccctgaaaaataaacttactaacctggaacaacttactaaactgtttgatggcaaatcaatgaagcaggaccatatttactattccaaggatagactggacaaaaccatcagaaacatcttgtctgtgttgcacggggattattaggactctcgggcacctaatctcagagaataatttcaggggcttcagagtttctaacaattgagcacacaaagacaccccaggaggctgccattgagtaactaagggcacctatcctcacctactaagagcaggttcctgaagttctccagcatcacatctcggtacagcttcctctggacagagtccagcagccccagctcctcctcagtgaagaccacagcaacatccttgaatgtcaccatctcctacaatgccaaacacatgcacactaagtttacagaagaagggcagtgctgagaaggtgtaaaggactggaagctgttctggagtctgggcaacttgagtcacatttacatagttctcttctgtttaccttctgtaatgctaataccattcaccaaaagggctgcaagaaaagaaatccttgcactttgaaattacttccttttgttagcacttataagtaagcctctggaactctgttgcaccctaggttaccaatattttaaattgtaataataatgtcatttgctccacaaaagctttagttctaacagtgactgatgctacctgtttctcctcatttacacacacacacatcacttatttaatttgtcaaatttacagggtatcagtcatccttactgctcaaatatgtagctcatcctctgtgctcatctggagactgctgcagtgatgggcacagctctggagcctgactgcctgtgtctggatctgggcgctctgcccaatgctagctctatgatcttggacaagtttcctatcttctcatttgtatggtgaaacttataccatacagtcctagtaataaaatgagtgaccacatgtaaagcatggaaaacagcacctggcacacagtaagtacccaacaaatgttagctacattattaatattttcattatatcttctatcccatttctgggctgcaaagtaattcagagaactaatggtctagaatataataatttgatccaactaatgcacacttagtttgaggttacctatacgaacaatgttgcaaaaacaatcttttgcattgacgttaacctctggaattctgttgattatctcctcaaaataaataccaaaaagtaacaatggcaatgctgaagaataatgacctttaaagttctgaaatcataatggcaggtgttttcccaaaacagactttcgccttccatcttagccttcttccaagaaagtataaatcatagtcaacactggatatgaaagctttttaaaaaaatctttcataatctcacaagtaaatttgggaagtaaaaatcatttattaaaaacattctcacaaacttattggtaataaagttcattctctttacacacatttgctgttcatctcgatttcttgttttgtaataataattcatttggaggacaccgaggtcttttcttccatggacattgtaaatatttttcattccactttgctgtcttgtaactttttgctgtagggtaattttaaatttttaaatgaacaactgttcagtcccatatttcttctggctgcagttctgagcataacagcttcagctctgaatgcagaactctgctttggtttgctttgcttttttgtaagtctttccacgcaagtgatatgcctgaaactcttggcccagaaagcaaaggctttagagttggcccaatgcttatcttcctgtatgaacatgaacctcttaacagtgcaaacgactctacagttcccctccaacagtcatctggggccatgaatagtgtgacagatgcaaagtgcctatatatcctatggtatgactaaaaactttaaactaagtacctgtattactctaataaaattaatacatgaataatgaaacacacacagacatacaaacatatatagataaacacatagctataggtactgagaagaatctagctcttcttatataagaatctagctcttcttgtacaaaaacatctatttttcccccaaccttagcttcaatataatcttgttagacaaaatcatattttatgtattccacctgagacatcacttaggagaaaatatttttagttttgagtctctagaacattatggacaaataatatcaaaattctctcacactggtttttgagtcaagattatttgtaggaaaactgatactgcaatgtaaaactgcaagaatcctcag[138 bp omitted]tggtgaaaccccatctctactaaaaatacaaaaaaatagctcggtgtggtggcaggcacctgtaatcccagctactcgggaggctgaggcagagaattgctggaatccaggaggtggagggtgcagtgagccgagatcatgccactgcattccagcctgggcaacagagcgagactccatctcaaaaaaaaaaaagaaaaagaaaaagaaaagggggagagggataacaacagtttacgtcaataatattagatgataaaaattaactgctaaaaattaagcggataaaaattcaaaattgttatgtattaatgcaagaacagttatatttaaaaaaatgaccatggacaaaaacagatttgtaagcagggtaataaggtgtaggattttaaaatttctattcttctttgtactattatttatgaaataaataataaaacacatttacaactaaaaggaaattttagaaaaggacaaaaacaaaaagcaagagcctgatacataaatgatactaaatgcctgttgtcattctttacccttggcaaagaagggggaaaaagatatgtccactcactgcaaaatgaggtcacatgtaaaacggcataaatgaaaaccagctcacctggaatttggtcatttttctctttctttttctagagaaaggcagagacctgagaaggcagaacagggtaatacgaaagaagccatgattaaaagggaaacgtatctttgtgcaaattagaaaaaggtgtcccttcccccagcagatgtggccacacaccggcgttaaggagcaggtagcatgggttggattctagctaccacttggctctcctggcagggtgcccgcatgcacggagcaacctgcacagctgtacccagtagcctcacatgccttacagctcccagcatgctcattctgattctgggagaggtgggaaaggagaggtagtggcatgtcatgtactggttaaaagtggactctggggacaaaatgtctacgttcaaaacctggtgctaccatatacttgctgagtaaccatggttaaattcatgaacctttctaatgtttcagttctgtcatctgcaaaatccagaccacacagtgccaacaatatatgattgttattaggattatctgtgtgcatagaggaaacctattataactataccagggatctctacttccttgcaactatagagatgcagataccattctgtatcacaaaattgccctggcgaatgtattttgtaagacatctggacagcagagattactgctctgtcccgggaaagtcacccgtaacttcggaatgtctgtagctctggcttcttacttttgttgccacagtatatactatatacatcgagaccacccttatgaaaaatgcagtggctagtaaatattcttcctgagctcaggggaagttcagtggtacatccctcttcccacagggtacaacaaaagactaatgaaacctgtgagactactacatttctcatgttaaacaaaaatgtgatcctctgtctagatatgacaaaatctcattggtgatgagaacacctagcctgcagggttgtttgtggggctgcgtgtgctcctctgtgaaaagcagctcagtgcttgaccctggggaggactggacaccaggagtttaatttcatggttcttcctcaaggtttgttactttactttacttactgttctcaggcaacattaaggctatctgtggaagagaaagaactgaaaaaaataaaaaaggaactgaaaatgaactgtgggtaaggcagagccttctagcaccacctcaaagagaggtgcactactccagtaggcacctgctccctcctgccccacctggcctctgctgtagaatccacaggatgtaagcacaactaccaagaacaagtatgaacttggctgcgtaatcagcagtaaaagagctgagttttctttcactcatccaatatttatggattgccttctaaaagggatacagtgcccagatagatgccagggtagagggtgcacggagtcctttgagagagcatggaagggccctcaaatccatacatgatgatggaggatggatgaggatggagaaaatgagggctgatcttaatgttggaaggtgactgacctatatttgccactcaaagagaaaggagtcatcagactattgaaacagaatgagagttagtgggtatctagggcaagagagaaggcagaaaatgtaagaagaccaactcacatgctttagaggaactccctcacttaatcccacaaccacccaagaagttgggacaatttgtaactctttttacagttgagaatactgaggcattaatattttaagctgctttgtcattttagctagcagaatggccaggactattagtccagggtctgtgttctcagttactaggacagtggctcttaagctgccagctcaccggtatcaatggggagctttaaaaaaaaccaatgcccagacccaagtccaggctctataaatgaggatctgtggaagaagagtttttatgaaatcccccaggtgactacagtgtgcagagaggattgcaaaccacagaccaggacatacatagagacagtttgcaggataagcccatgcaattaaccactaggccatttggcctctcaagaaaattgtcagagaacactcaagccaggaacagagaagggcctgggagccaggcctcttgattcccagatccccatttctctcttttaaatgatgttcttggagctgtcactaagaggaaggagcagtaacatgcgctgtgggtgtctgcagtcacgcactccgtgtgaggacagccttccagtttagacctctctgatcacctttatcaagcagggggtcactaatcagccaagggactttgagaattcaaaagaaaagggaatttctgttaaatatgaaatcacacagtggtcatcctatagactattgttgcttcttcatgtttgatagaattaaagcctgattatgttcctttcttggttaaaacaagtgcatagctgcctttgggataaagtctagattcttagcaagccacacaggaatctttcatgtctgtctgctcattttctctgcaaatcttctctcccctttgatctccagccgtgtcaatcacttgatctcataaaagagtctccaggcccttgcatgtgccacccctcctgcactcctttctcttttcacttagagcaggggttggaaagctttcataaaaaggacagatagtgagtatttcaggctttgtgggtcacatgctgtctctgtccaatattgttctttcttttcacaacccttcaaatgtaaaaatcattcttagctgaagaagagacacacaaaaacaagccacaggcaatttgcccactcccatcacagatcctcttagcttttaacactgagcttgtatgtgccccgctctgtgatacctttaagaaggtttcgctgaagcctcattagctcctaaaacccattttgccagcctaatgaaagcggaatgctttggccaagagcccaggctacagaatcaagctgccaagcttcaatcctgactctaccacttactggcagcataaactgacacacattaattaacctctcaatgcctctgttcttcatctgtaaaatggagataaacgttgggttgttatgttatgttatgtgagttcaatgcatcataatattagaaagtcagtgtgagtggtaataaaatctgatcaatgttagccattgttactaccatcttcattatcatcactatgaaataaatctagaagctgctcattagctctggtttgttgcaaagtatgtttattttaggtcagtaattaaccatataggtgtacatcaccctttcaacattctgaaaaatctattggcttcagcatcccaccaaaactgatcagagataagggacagggaatattcacatcttttattctcccacatctattttcagaaaatttgaatatactctcactgagttgaaggtccccattcctgctgcctgctggaaagctgcaccaaccacagagagttaccaaataattcctctctgccaatccctacgtttggtaataagcaaatggagaatttgacacagttcccgctgcacagaaatctgtagccaaatgggaaagacagatcagaaataagcagcagaagcatctgcgagctcaaagacaggtcaacagaaacaatcaaacctgaagcacatgaaaacaatgtgcattctgttgttgatagagtgctctacaaatgtcaacgaggtcaagatgttaatagtattattcaggtcttttgaatccttactggttttcagtcttcttgttctactgattactgataaaagagtgttgagatttctacatagaactgtgggtttctctatttttttcttttaattatatcagtttttcttcatgtaactgttgttttgtaggtacacttttaggattgttatgtctactcggggaactgacccttggcatggtgtccctcggcatccctggccttggtctgaagtctactttgatattaatatagccactccgtagtacagctccttttcactttttcactttcaaactatttatgtccttgtatttaaatggagttattttagaccacatatacttggttcttgctttttatccaatcttacaatatattttaattgatgtattcaggccattagcatttcctataattattgatatagctgggtttctgtctaccattttattatcttttttcctgtttgtcctccctgattttgtccctctattacccctttttctgccttcttttgggttgatttttttttttttttttttttactattccattcattgtatctattagcttttggctatatgtcctttttttttttttccagtggttgctctagggttgtaatatacatatctaatctttcacagtgtatttagcattactgttttactactttttgtaaaatgcagatgccttaccaacaaatagtttcctttatctccccactttgtttcatttgtatatactactctatatacacaaaaacctctagccaagaaagttataatttttatttaaacagtcatgcatattttaaagagtagaaaaccagtattttatatttgccaaaaaacttactatttctggtgctctttcatcatttctgaagttcctagtttccatttaatatcatttctattcagcctaaagaacttcctttagtgctccttttagcacagatgtggcattttttcatttcattcctgaaggacattttcactggatatagaattttgtactgacaactcctttaagaatattaaagatgtttttccaatgttttctggcctccatggcttcccatgagaaatccacgtatatctgaatcattgttctaccagatatataatatgtcattttctctagctgtattcaagaatttttgtttatttttaattttcagaagtttgattatgatgtatccagaagtgattttctctgagtttatcgtatttggtattcaacgagtttctggaatctgtaaatttatgtctctcaccaaatttgggcaattttcagctagtacttccaaacaaacacttctctcctctcctcctgagactccaaagacaggaatattagacttctgatattgtcccacaggttccgaaggctctgctcatttatttttcaattttttttctctctgttgctcaaattgcatttttatactaacctatcttcaagttcactgattcttttttctgtcatctccagtctgctactgagcccatcgaataatttttttttacttcagatgttatctttttcataaaacaaatcttaatttcctaagaattcaaatcaaagtattttctctaactataacagatttaaagtagaaatgaacaagaaaaaatatctggacaatctccaaatgtttggaaattaagcagcatacttctaagcaaccaatgaaattagtcacaaaagaaattagatgcagtgaagtggaaatgcttcttagaaaataaattagagcatattttaaatggaatcaagacttaaatgcaacatatcaaaatgtaagagatgcagctaaagcagatattatagggaaatgtatagcaatgatgcatatattagaaaagaggtcttaaaggcaaacagaaaaaaaggacgtagtaaacctaagacagaaatcaatgaaattaaaaacacaaaaacactagacaaaatcaagcctatcaaaatatggctgggccaaatccagcccactgcttgtttctgtacaggatgtaagctaagaacggcttttactttttaatggttgaaaaaaatcctgaaaagattattttgtgatgtgacaattacatgaaactcaaatttcagtgtccataaagttttactgtaacacagccatgctcatttgtttacgtacggcctatggctgcttttgcattacagcagcagtgctatgtagttataacagagttcataggtggcactctcatttcttcatattgttgctaagcacaatttaaaccactgtgactcagcattaggttaactcaattgggttaaatgctgttaattgaacagcatttcaagtaacatatgtattgctgtaccacaacattttaatttttgtattactaatacacactcttcaagccaaacacaagaaaaaaaaacagaaaaacagactttgttacactttgaaggcacaatggaggtgaaatattttgtgaatgaattagatggcaaagcttatcatgcttattgtgcttcctatgcagtgacaacgtatctatgctaaactaatcaaacctatgtcaacactgtcacgctaagcactcatcacaatattctcaattcacaataaatggtccgaaaaattagaaaattttaaataaaatgtctcatcagagcagaatttcttcacaaaaaaaataatgaaaatgaggtagcaactacagtacattttgatattcagatattcagcttctatttctgccccaagcaaggaaagtaatttaccagtgatgaattaattaaatcatgtttgattgcagaaggcaaagaaatgtatccagataaaataaatttgtttatgattagtagactttgggcaagaccaactgctctaagagttgaggacaatgggaacaacattatggtccattaaaatacaagggaaatgattctgataaatttatttggctcttgatttcacagatgttactaatgttgctcagatattgtgtattcaaggaatcaatgccaagtttgagtggttgaatggttagcctctaggaacagtcgatatggaacaaccacaggtgaaaatattaccaaagaaggtacaaatactaattcagtaaacctgaggcagtacaatctgctaagaagtgttaaaattgatagtggtaaaagatatgttggagcagaaaaaggcagaggttggatttataaaaacatgtatttaaagcctatggttactcattgtattcttcatcagcaggtactttgcagagaatattttaatctatcatgtgctattgaaccactagtggcaacagtgaacttcattcaaactcaaagatttaaccatcatcagttgcatgaatttcatgagaaacagaaaaattctgacttgccctaccacatgagagttcaatgtctgagcagcaatgaagttttattgtgattttttttaaatctcagggctgagactgaaatatttctgaataagaacttccctcaagcattactattgatataatactgaatgacattggaaattagctttagctgcagacttgataatgcttcttaatgaactcgacctaaaattaaaaggcaaaacagtacttatttgtgaagcttatagtgtaggaaagttatttcaaagacagttaatgtctgaatcacaggtaatgctaagccactttacaaatttccagtgctgtcaaaagttaaaacaagtaatatctcaattcccacacaaatttgtagtatatatgttatctgagcccaaacttcagaattgtagcagtgttttcagaccttgatgcaagcgcaaaggacctttctgcatttcaaagtccatttcattgtacactgcataattctcctaaccttccattgaaagtgattattctgaaatgtagtgacatactaaaaggtaaatatcaagagtctacagtaattctttaaatgtcttctgtattagtttctattgctgctataataaattaccacaaacttggtggcttaaaataatgcaatttattctttattagttatggagatcagaagtctaaaatcagtttccttgggttaaagtcaaggtgtcagcagggctggttgcttctcataggaatccatttccttgccttttctaacttctagaggctgctggaattccttggcttatggctgcagcactccaatttctgcttctgttatcatgtcactttcttctaattttgatccttctgcttttctcttataagaatccttgtaattacactgggcccaaccagataatccaggataatctacacatcttaaactccctaagtttaatcacaccagtaaatatctcataccatgtgaagtaacattcataagctctgggaattaggatatggacatctttagggagccactattcagtttaccacatctttcaactcattgatattcacaattaaaatcatttgcttatggattagtatcagtatttcataggacctatttgtttaaaaaatttcttttcaaagataaaatacataaaatctcattacaaatcagcattaacagatgaacatttacagtcaattttgatgacaaggaatagcaaccttgaacttcaattaagttgtactcaatcattatatcttaaattttgtcaattaaagtttcctctcattatataaatacctaaataatagtactgatatttctagttaactggaaaaactaaaatatttacaatctgggcctaaaaaaataggtttgctggctcctggacaaaattaattcaacccacaggcggttctttgcaaagattagtaaaaattaaactcctgatgaagaacaaaagagaaaagacacaaattaccaaaatcaagaatgaaagaagggatatcactacggacttaacaggcattagaaatataaatgaattaacattaatgaattcaaagtgatagatgaaatggtttaattccttcaaagacacaaaacacaaaatactgatgtgagaaatcaaagagaaaaatgaaaaaaatcactcaaaattctacatactgcattgatttgttcacgtgatgttatggaaaaggcaatggggttggggagtgaaccaggggtttcctggggttaagagttggggaagagtttgactacaaaaaggtaccacaaggggatgtttctgggcgatggaactgttgtgaatcttgattgtggtggtgaagtctacatgacaatgcaattgtcaaaactcagaaatgtacaccaaaaagaataaatttctactataagtagataagttaaaaaataaatgttaaaaaattaaataaggctgttctacaggtacttgtcaaacttttaagtgcacagcaatcaccagctccagtaaaagtgaagcagaaaaagcatttgacaaaatacaacatccactcatgacagaacttttgcagactaaaaatataatggaacttataaaaatgctttcccctatgatcaggaacaaggcagagatgtgtactcttgacataactattcaacactgtactgaaaatcagccagtgtagtgaggcaaggaaaagaaataaaaagcatacagattagaaaggaagaaataaaactgaccctattaatacacaacatgtgtctctgtggaaaatcccaaggaatctaccaaaaaacaaaaatttctagtgagtatagcaaagtcagagaatacaaggtcaatgcacaaaaatcaggtgtatttctatacactaacaatgtacaactggaaaccaaaattttaaaacaatatgatttaaaatagctctagaagaataaattatatattatactcgggcatatgtctaaacaaaacatgtatagatctgtatgcagaaaatcatgaaacactaatgcaagaaattaaagaacacttaaatgaagggacatgttatatcaatgaactggaaaactcaatgtgataaagacggatctactgattttacataatgtcaatgaaaataccagctgaatttttggtagatataaataagctgattctaaaatgcatatggaaaggcaaaggaaccagaatagctaaaagcaattttggaaaaaaagaataaatttggaagaatcaaactatccagtcttaagatttactatcaagctacagtaaatatgatatcttggtactggtgaagagatacacacatagatcaatttagcagaacatggtacagaaataaacccaaacaagtggtgttgggatggttggtcattcatatgtaaagaaataaaacccaacttaaccatcacatattataaaaaaagttaaaatggatcacagatttaagtgtaaaaccataaaacttctagaacaagagaaaatcttcacgacctggggctaggcagacttcttagatatgacatcaaaagcacaatccaaaaaagataacattgataaattagatgtaattaaaattagaaattttgttctgcaaaagacactattaagagaatgaaaagacaagctacaggctgagaaggaatatttgcaaatcacacatccaacaaaggacttatatccagaatatataaatagctctcaaaaatcaacaataggaaaaatataacccaatgtaaaactgggcaaagcatgcatacagacacttccgcaaagaagatataaggatggcaaagaaacaataacaaaaaaagaaatatctgctgaacaccattagccattagggaaatgtaaattaaagtcacaatgcttagaatggctaaaataaaaaaaaataaggaaaatactaagtgctgatgaagatgtaaataaactggaactttctacatcattagtgagaatgcaaaatggtacagatactacagtttggcatcttataaagttaaacatacattccccatatgatccagtaaccacactcctggcttcgtaccctacagaaataagcacaaaaaaaactgtacatgaatgtttatatcagctctattcataaatgccaaaaagtggaggaaaaagtctatcaaccagagaatagataaactgtgatacatccataaagtggacacttctgttaaccagaagtaaacagaaatgaagtattgatacgtataacaactttgatgaatgtcaagagcaatttgctgagtaaaagaatccggtctcaaatgttaacatatagcatcagttcatttatacgacattctcaaaaagacaaaactatagcgttttagtggttatggtagttgccagtggttacaggtatggtgaggggtaattatgagggaagacatgaggggagtttttggggtgatggaactgttctttttctgactacggtagtcgttatacaaactatgcctgtgttgtaatagaattgtataccaaaaataacaaaatagtcaatgtcactgtaaaaacattttttaaaaacctgttttaaaaacctggaaacacaacctcagttataaggcatggtctataaatgttgttaccatttctaacaatttgtttcttaggaatttttttagattatcaaaacataaccaatcattgctcttcaactcttcaatactctgaaatagttggtggattatataacctaccaatattaagtgagattaaggaatatatccaggggttatttctattctattttgatacctaattccaattccacactgcaaatccttgatgccagctgtctgttgagtagctactctaaccataaacccttaacaaccttgtacgatgtgctgggcacatggagaaaagtatgacatggtcccagaaatagaagaactttcagtgtatggatttagataaagagaaataagaaacaaagagctataagacttaggcaaggcaaactctatactggaacacaaaattcatcaccatccttctccaaggtacaattctcttgcatcccctagcttcctcaagtaaggaccattctgtaagcttcaacgaatgaaaaccttagagtagctgctggcatttccctttcaaagtcttggatataagcaatttatgatcatcaacgtttggcaattatgacaatcaatcaaacgatattatactaagtcgatgttagagatttgctttaaaatactgaaacaaaaaaaaaagggacagggagttgatacaagactggcaaatgttaacaaaggttgaagctgggtgacgcttccacagaattattttagtcatattacatttggctatgcttacaaatttccatagtaaaaacttaagggaaaaataaaagctatgaagcctatttggttaaacatgggtgaaaatccaaaaagaagtctactggaagaggaaaacattgaaatattaatattgttactgttatatcttgtggttagcataatttttttcttttacactttctatactttcttaatcttttacaatatgcaataatttatataatcagaatatgaactataaatatttcaaataaaattaaattacagataattttaaaaaatcaaaaattcaaagcttattaaccttgctttcacggtcctctagtaaaatccaaatatgtgttctgaagctgatactaaacacatcaagaactaaggcaatggatggaaactatttgaattcaaatcccagctcaggctcttaccacctgggtgacctaaagataaaccacctatgctctatgtctgtttgcttatctttaaaatgggaatggtggtacccaacccaggctcaaagggctcttgtgaggattaaagatgttaattcatatcaaactcttagaatgatcagcactaaatgtttaaatactatctttattactcatgcccaagtactccctcatccgtttctgcatttattgaacaaatatcagcgcatcttcgagcagaatttgccagtgaatgatggaaatatcgtcttccctgaaaagaaaggatgataagtactactcaggtgagactccgctgccaagtgccaaagggtcattccctccttctccctgcagcctttttcaagaagtcaaggctaaagaaggaaaggaggatgggggaaatcagaactcctgcatgaattacaatggactacccagacagccaggagtgatcctgtcctaaagaaaaatctctcagtgatcagaaaagggccagggatactctgcagctggagctctgaccccatcctgggttcacagaagctttcagggaactgagtccttctcagaaaattaaaaagtgctaataacaagagacccatcttctaccacctgtcaggctctgttccaagtctttttatttaactctcaaaagaactccattagatagatactagtaccattttaaagaaaaagaaacataggcagagagattaagatactcgcctgttattatactgctaggaagtggcagagctggttgatggtcaggggaaagggctggggaagtacagaacccaggagatccccagtccctgcgatgtaggatcttggacccccggcgctaagtggggatgcgccagctgccccacactggagaaggctcattcaaagataacacaaatcccgcccttcgccgcaagtggattatcctcccctagagctactgcccggttgctactggaccccaacaaaacgaacatcagtatggacggaaggagcaggaagcagggcggggagcgctcacctttctgggaggaacgaaggccgcggcctagcgtacctggggcggaagtggctctgcctaccgagacctcctggactacgcttcccagaattcccgacgggatcagggagacggcctcagcctcctagagcggaagttacccgactacacggggctcccaaactacatttcccagaattcctagaaaaactctccacttatctgcctgcctaggacgcaagtaccgggtgccaagctgagagcctggatgatatttcacatgtgccggtcccaaaggaattccttaactcccccttcctggaaccgaaatgcttccaaagacagagagctcgtatatatatttctctgttttacccagcggaccgtgcatgaaaggcgcctttcctggcgcgtgtgtctctgaccctgtggatcttctggacaattcccggaatttcttgcagggtagcactttcccttaagtcgtctctttctcgtttggatagtcagtatttgtatagtcactattctcttttggttagccatccaattttatactgctagtccagttctactgccttccccctagagtttgaatttatttttcttcaaacgcgacacaaacccaaataaactcaaccaaagcggactttacctacctacctacctacttaccaagaaaatatcccataaaggagagaacagagaagcttgcaatacaggaagaaaaaagaaaagaattacagaatggaagcgatgtgtgcgctaaaaatgcaggtacttaaaggaaattgggctgatttgtactggacaccgaatttaaggaatacaggatctcaacctttctttgactcgattacctttttattccattttggtgtggacgcgtctgaaactgatagtgctgctgctacctaccataatgtgtttgttgcaagatccacaagaacgtggatgccaagaatccacaaaaaaacagatgcaaccgttgatgaggccataagcagaaacagtaaatggttcccacgtttcctctgctttaactactgatgatgaaatgcaagtcataaggcaaatagaagggctgtactgatacagacaaaatgttattattatgggaagggataagtctcttgtaaaacctcgaaatttttttcttctttgagaaaaatctatcacctattttcaccctgctcttgatatagcaaatattgtaagttgtcttatggaggacaggatgattcagggaggacggtgaatgggttgactcaatccagaaaaggaagaggaaaataaaaagacataacgaccaatctgtgaaaatgctcacggggtcaggagatcgagaccatcctggctaacatggtgaaaccccgtctctacaaaaaatacaaaaaattagccgggcgtggtggcgggcacctgtagtcccagctactcgggaggctgaggcaggagaatggcgtgaacccgggaggcggagcttgcagtgagccgagatcgcaccactgcactccagcctgggcaacagagcgagactccgtctcaaaagaaaaaaaaaaagacactattaagagatgagactatttgattctttatttaacaactcctttccaaggaaatgtttctgaaaatacatacggtttacatattaaagaggatcaatctgataataggggatttttttttataaaatgaaaggaaattttaaaaataaaagggacagaataatactttgtgtacttccacttccagtaataataaaatgagtgatttggaacaaacatctggcagaggaaagatgagcaaactttttaaatgtcaaaaggcatcaaaagacaagataatggagaaatggtgggccaaaattcagaaacacttgggagagtcatgcatttggggctacttttctcctggggatgatggtctagtttaggatctgaaaagcctagaagctctgcagcacttttgacacctatatgaagctgggggaacaaaagattctagcaaaaactaaaattcgcatcttttcaagtgcacataagatttgcacaaattagcaaaatgatacgggatttcaaaatactgaaatactaaatatgcttttgaatacaatgaaatttggctagaaatcaataaaaatacaactaaatgattcatgtgtgcatttaataaatattgtctcatctccaaacccaccattcttcactctgctttatggggctggaatgggggaatctgcagccaatctttcccgacctccacacccccaatctggttctgtgttgggcaattattagcagaagcgtataggggtggtgggggcagggagatatactatatcctgtgcctgccaaccagcagtactttttcttgtagcaactgcctaattttcagtttttctaacacttgaataacctatttcatcatggctctttgtaaacattattaaacaacttcccaaagactgatccttagatgtctaagtcctaacactgcagggccctgcttttgagctcagagacagcagaaccagcccaacattgacctctcctcagaggtctgagtttcaggtgagcatgaccttccttcaagcttctaagttttagtaattctggtctcttcactttgtttcctcagacctcaggtggttgctgcttgctgcagttgctatttcctgcagttgctgcttccatcatatattagagttcttttttttttttttttttttttttttttttgagagtctcgctctgttccccgggctgaagtgcagtggtgccatctcggttcactgcaacctctgcctctcggcttcaagcaattctcctgccccagcctcccgagtagctgggattacaggcatgcgccaccacgcccagctaatttttgtattatcagtagagatggggtttcaccacattggccaggctggtgttgaactcctgacctcgtgatccacccgcctcagcctcccaaagtgctggcattacaggcgtgagccactgcatgtggcctacagttctttttctgctctttcagaaatctagctaccaactctacaatatgctaatttttcttttcaaataattgataaggtttctatcttctcagtggaccctaaattacaaacttgtttagaaattaatcaaaccacttttaagtaatccatagataaaagactgtggcattgaaatttggtgtcatcagtgaattctaccaaatatttaaagaagaaaccatgttcatctcaaaattattcctgagaataacaaaataggaaacactttccaactaactttatgaggccactgtaataacactgacaaaatttgtgagaggcttcattagaatggaaaatgacaggtctggccaggcacggtggctcatgcctgtaatcccagcactttgtggggctaaggcaagcagatcatgagatcaggagatccagaccattctggctaacacagtgaaaccccgtttctactaaaaatacaaaaaaaaagccgggcatggtggcacgtgcctgtattcccagttatttgggaggctgaggtgggagaatcgcttgaacctgggagatggagattgcagtgagctgagatcgtgccactgcactccagcctgggtgacagaggagactccatctcaagaaaaaaaaaaagaaaagaaaaaagaaagaaaaagaaaatgacaggtctatctcgtcataaatatactttcaaaaatgctaaacaaaatgttgccaatgatatataaaagggcaacctaggtatcagagaaaaaaaaagtttgattaatcacccatttatcataagaaaatttaggcaactaagcaatagtaaagatctacaaaaatggcaacaaatatcaaaaggaatagtgaaatattgaaaacatttcctctatgatggggaacaaaataatgatgtccaccccaatcatttctactaaataccacatttgctcctttatcctgcaatcttgccaactaatctaattaattttaatattttatgtgtagatcttttgaattttatatgcatgctcatgttgacttcagatctgcaacaaatggggcgctgcagcaacatgggaacagggaaaatattcaatacatgttgctgttaaattgagtattgtgaaataaaactgaaattgacctatacctcccactatatgcaacaatctaaggctggtggattgtagagcccgatttgaaaagcatttcttatgacacttaaatctactcagtgtataaacctataagaaatgtgtaccaaaatacacatataagaatgttcatagcaggatcattcatcacaatgacatgctgagaatactccagatgtctatcgatgatagtatggataaatatttttgttatttacacaaggtaaaagcaaggacattgaacaaactttagctgtacatgcaataccatgatgactcccataaatatgttgagcaaaataactagacaaacccagtagatgcagtgtgattccacttgtacgaagttcattagacatgcaaaattcatcaataggatgattttggacacttaaatagtaaaaatatgaagaaaagcaagggaatcttaaaacttagggtagtggtttctttttatggggaagaaagcatcatgatgctgtgagagtggggtgtttgcaattctaccatgcttcaatttttgttgtgggtggtgattatacagctgttcattttatattcatactttcacatgtatatttatgattcagacacttttctgaatgtgagtgatatttcaatctgtaaaatcaatgatatatgaccaacaaactgtggtgcatcaatacaatagagtattattcagccataaaaagaaatgagatatgaagttatgaaaacacatggaataaccttaaattcatattgttaatggaaagcagccagtctgtcaaagctacgtactgtaattcaactatatgataatctggaaaaggcaaaactaaaggtcagtaaagtgatcagtggttgttagaggttcagggagattaattgatagagcacagggtatttttaagcagtgacactattctgtgtgatacagtatggttgatataggacattatgctttgtcaaaacccatggaatgtacaacacaaagagtaagccctaatgtaaaccacagactttaataataatgtatcaaaattggttcattagttgtaataaatatgccacacacatgcaagatgcaaacaataggagaaactgggcaggggaaaggagagtatatgggaaatattaatactttctcagtttttctgagcagttttctgtaaccctaaaactgctcttaaaataaagtctattttaaaaaatcaatgatatgtttcaaaggaaactgaatatatggcatagaactttttcagaacttagagggaagggctaaaaataatgagaaactctataatgaatatgaacatactgatcaggtgtatcttataagctaatgagaaaaaatgaggattagagaaggaagcagattgtaataaataaatcattaagaaagaataaacaatttatccacatgggcaaaatctcatattggaaggaggagaagaagatggaggagaagggggaggaaggtgagggtatgtaggaggaggagaagtaggaggaggaagagtaagagaaaaaggaggaagagactcgtagagatgcacttgcagacattgagaaattttttaatggcaaggctgaagactaaagaattgagtcaatttcaaaggaatgaaaaaataagctttgcattttaattattgtctgcaacattaaaagtactaataaaatataaaaataatctatgggatttttgaggtgaaaagattgatccttctatggtcagagaatgttttgttcatgtgcactattcttggcatacaagattcagttgtgaatcacttctaaattctttccggaaaatattcttcaagacatattacaggcctttgacaacaacacagataaagcgtccacagaccgtcttcctagtttatttacatagaaatgctggataaaatgtgaatgtgaaaatatcatttatttgaataggagaatgtttgagggcacacatattaaaaagaaaaagaaaaaaagaaacagatattatttatttgttccattatatcccccactacccactctcattttctcccctgccgcatcagtaaccaggtcgatctgtttaatgtgtgcctgttgttggtatgtctttctggcaaaatgtgtggaatttcggatgcatatatatatatcttgtgttataaaactctgttaaaaattttcactcaaaactgtttttctcaatattttactaaaaaaaattttttttgaagacagggtcttaccttgtcacctaggctagagtgcagtggtatgatcacagttcactgcagccttgaccaactgggctcaagccatcttcccacctcagcctccaaagtagctgggactatagttgtgcccaatcacacatggctaatttttttttttttttgcaaagatggggtcccactatgttgcccaggctggtctcaaactcctggcctcaagtgatcctcccaccttggcctcctaaagtgctggcattgtaggcatgagccactgtgcctagccctgaaattttataacataaagaagagttggaagaattatacagtagtcacccatatattctcagcttagatactaaaattagcaacatttatgtcttagccatctatctagctatcttattacttatccatcagaacattaacattaccccacaaattccctcatgacactttccagtcagtctctaaccccttcccccagtggcaaccactgttctactttttcaccataaattttactaattttagaatatgaaatatatggaaccatacggtaagaactcttctgtattacaattctttgagtatagtgtttttcagatccatccatgttgatgcacatattagtcatttgatcctgaagtgatgttctattgtatgaatataagtctttggaaacttgcttacattttaattgtttaaatatttttatgaataaagatcctgcagcatacttataaaagtctttttgcgtgcatgtgctttcttttctctggaataaatatctatgattagaattgcttgatgtgtttaactgcttaagaaaccaccagatcatctcccaaaagattaattttacactgtctcccaaaatatatgcaatttctgattgttttgaatcctaataagcatttgctgttattagtatttttttttgagatggagtttcactcttgtcatgcaggctggagtgcggtggcatgatcttggctcactgcaacctctgcctcctgggttcaagcgatcctcctgcctcagcctcctgagtagctgggattacaggcacctgccaccatgcctggctaatttttgtatttttagtagagacagggtttctccatgttggccaggctggtctcgaacttctgaccttggatgatctgcccacctcggcctcccaaagtactggaattacaggtgtgagccaccatgcctggcctgttatcagtatttttaatatctgccattctggtgatcttgtagttgtatctctctgcagttttcatttgctttttcctgatgacaaataatgtcacacttctccatgggctatattaacaatttgtatgtcttcctttgtaaagtaactgttcaaattttgcccattataattgagatgttgggctctttaatattgtattgtacaagtctttatatattctgggtgtcagtcagtctgaaatttgggcagagtttaatgtagaataaggggcaattctttgcttgacatctttttccctggatttcttccctcactttccaggtcctgtggtcacctcaatctctgtcatctagatcttcaagccagtggatactacagaagcatccacagattcaatgaaacagggatcaaaaatattcagaaaaaaaaatacaaattagcaacacaacaataaaaataacacaaataaaaaacccaatacagtataacaactatttacatggcatttttattgtatagggatggaaataatttgaattatacagggtgatatgaaaaggttagatgagactactatggccattttacataacagacttgaacatccgcggattttgatttccataagggtccctgaaccaattccccacggacaccaagggactactgtattcaggattttttcacctagtgcatgaaggatattcatctgtagttttctttccttataatttctttgtcttgtttggtattatcagattaatgctggcctcatgagacaagctgggggtgggtgggtgttcccttcccttttcgtttctgggtttatttaaaattcacatctttactctttaaatgtttagtagaatccaccaatgaattaatctcaatattggtttttttattgttgttgttggaaggctttatctattaatcagttttgaaatatatatcaggccaggcaggtgcagtgtctcaagcctgtaatcccagcactttgggaggccaaggtgggtagagcacttgagcccaggagttcaagaccagcccaggcaacttggtaaaaaaccacctctacaaaagatacaaaaaattagctgctcactgtggtgtgaacctctagttccagctactcaggaggctgaggtgaggtgggaggatcaactgaacctgggagttcgaggctgcagtgagctgtgatcatgcctctgcactccagcctgtgtgacacagcaagaccctctctcaaaaaaaattatatatatatatatttatgtgtgtgtgtgtaaaaattgtatacacacacacacatacatacactcaactatctaggttatcctagatatttctttttgagtgaactttggtagtttgtgcctttcaagtaatattccatgtcatgtaaattgatgaatttatggacaaagagttgtttgtaatgttcctttataatccttttaatatctgcaaaatctgtaataatgttccctccctcctgatttttgttttcttctttttccccgttggtgagtcagttgaaaggtttataaactatattgatcttctcaaagaataaggttatgattttgttgatttttaaagattgtttttctgtttccaatttcattgacttatgtagctgccacaaaacttcactctatcctctccaggacccagctgggctcaagaattaaattaacataacacagattaacaggagaaaagcatgcaaatttatttaatacaagttttacacgtgaccagagccttcattacaaaatgaagctccaaagaaacagtcagttatgtatacactgtagtgaacaaagaatagtaagttgttaagaagcaattaggccaggcctggtggctctcgcttgtaaccccagcactttgggagacagaggcaggaggatagcttgtagccaggagtttgagaccatcctgggcaacacagtaagactgcatctctacaaaataaaaataaatttaaatttttttcttttttaaaaaagaagcaactaaatcatgcggagaggcttgaaagatgttattttaaggtggtctgtacagaattcttttgggcttgacttctcattttgaggaaaagtatattgctccttttttttccagtataaggaggggatcttctttcctccttcccaccctccctccttccttcctacctcttcccacagacgtgctagcagaatgtgctaattagtaaatatcttctgccctgagaagagagatgacacggcaagaagaaggatgctaagtcacactcagttaaggttctgctgctaggagccaaagagtcattctttcctcattcctgtgaccatctgcgagaaatcagaactgtgtctccctcctgcacgaatcacagaggacatcccgatacaatagcctggagtgattcccgccccattccccccacccccacttttttaaaaagggaatccaggaatcgtcctgcttcctgtagggatcagaaagaaggggcaaaatagcactgcaggtggaactctgatttcttcccaggctcatagaagctttcaggtaactggggcttctcgggaaattaaaaaaaaaaaattaataaaatgaaccacacttaccaccttttacttgtgactatctcatttaattctccactcaactgcatcagtttggtactactattccccttatgttacataaaaggaatgctaggcacatacagtttgaattacttcccaatttcacacccctagaaggtggcagaactgcctggtcagtcctggagtaggaacagagcgcacaaaatacaagagatcctcaacccgccaagaccaaatgctgcaaactcgacaaaggctcactcacctggggcccaaccccatcttccactgctagccgcggatgctcttctcgaagacaaggagggccgccgccaggctaaacgaaacattgctgtctcaggcctcactcaacttcctgaaaggaatgatgacctcactttcatggagcggaagtgactgtagttacccacaattcctggattataaccccagaattcccaatgagataatcgtcacagccacgccctcctgtagcggaagcccggccgcctacacagagctccaaggttactgctcccagaatcctcgcaaagaattggcaatgtcgttgcctttctctggcggaaggctggctactaccctttgaatttggaatgtatgtcacacagttctagagtagaatgcaaactcagcactgtcctctttgaaccaaaatgtctccaaaaacaagattctaatttatacttaatatttcccccagaagcccaatcattaaagccacctttccaggaacagaagtgtttttgacactgtgaatgctttggaccagtttccagaatcctcttcaggtagtgcttctcaccagcgtttccctttttattttggataactaggttcagtccgaatcattctatctcactggtcaagctcagccttcttcttccttattctcattttttttctttcacatgtgacaaaacaaatgcatttgaacgcccctcccaccctgtctcccacccaaatccctttagtagagaacacagtttgaaatgaaaaggaggcatagattataaaggggaagatatgtgtaagcaaaaaatgcagaacttagaaactgggcacgaatgtaaggaatacaagatctcaaacctactttgactggattttctactttattccatgtgttttggatgcatctagaactcttggcagtgttatctgatatatgctattcattccatgatacaagaaccacaagaaggtcatgcaaagtttattaaagtataaagcagaagcagcaaaagcttttgggtgttccttgactttaattgctcattgtaaaacgtggctcatgaggcgaatgaaaggaggtgtgttcatgtgaaggaattattataatatgaaaagagataaatatataaaaatttgaaatatctttttgttcaagttcaagcatcacatcacccacttccaccctattcttattatcataaatacaatgataactgaagaatatgaaaaccagtgagaccatatttcgttcaagtgagtcgattgagagttggacgcaaatccagaaaacccaacaaataaaaatacacgaaggttctgcttaccacttttcttctggacaagaactaaacattttcatacctttatgttatgaaaaatttcaaacattgatagaaataaagagtgaagtattccattgcctcatcacccagattcagcaattttcaacatgtgccacacttcctttatctatcaatattgtctttctgccctttttgttattgtaattttaaaacaaaatcatgacactgtattatttccccctaaacactcccatgcatacttcaaagaattacattttctaatataacaaaaatacaactgtcacactgaagaaagttaataattccttaatattattttatgccctaaaaaacaaaacttcagaatttccagtcatctcaaaaatgtccatcctttgcatgtgatcgttttgtctcttgagtctctttcaatctggaagagtatcccccctttgatccactttaaattcatgcttttggcatatacaagacatcaggtcagttgtcaagtaagatgtcccacattctggatttttaaaaatgtttcattatgctgtcagttaacattttcttgaatatcttctgtggctctggtaaactacaatttagatttagaaagcagatgagattaagtttcatcgttttcggcaagaatacttctccataggtaggtttattttggccttgttcagtagcatcaccttctccttagtgcagatcacagcacattcttgaatattactgtttcctacagcacctaagatactacacctcaatcatgcacaaatgtccattagaagaagaacaaggttaaaagagtttgagggaaagggtgaagactttaggaatcaaaattttttctctttcaattgctaatctcatcctattaagcatccatagtcttgcaaagtgtgaaagaaaaataaatctcgggacccccaaatcaccaagccagagggaaaagtcaagctgggaactgtgtcaggcaaacctcccatttgattacttaataagatagctgtaaagcagaaaaagctacatacctccttcacaatttgtccacaggggcctgtttgtgggcctgaacatctttatccaaaagcatttctgttgaatttcaccctggtaatgtaaattgatagcttatcttcacaggtgtgggataaaggacagacagaactcaaagtcattcctctgttcacctgaaacaaatgcatatctgattgcttcctcttccctattgtttatgtagtaatgcagattcactaagcaacattaagacctaagtcactattcgtctacccacctctcacttgtgagttttgtattcagtaaaaggctaatcagagcctcaaaataatgccactgtttgtctcttatctacctatgatatagaagctcccactcccattcgagattgtcctgcctttctggacttaagcaatgtataacttacacatactgtttgatgcctgatttctccctaaaatgtataaaatcaagctgtgccctgaccactttgggcacatgttgtcaggacctcctaaggctgtgtcacaggtgtgtacttaaccttggcaaactaaatgttctaaattcattgagacctgtctcacatacttttgggttcacaaaagtatgctttagtgaacacccatgtccatttgttcttgatctttaaatgagtgttaccataatataaattccttgaatggagacccttgaatctaagagtatgcacagtgcatagagtcatattaccaaacctatcccaaaacaagtgatctgattgactgagccaatagtatttgagagcattttccccccaaaatagatgccatgaattgaaatatcccctttcatggcatgtttaaaatacttctaccattgcacataccgacttatcaaagttatctggtctctgatctctgtacctctaaagcaatgcttcccagccaaggtcacatacactgagaaagtgtctcacaaataacttttaagtgataactgataccaaatcttatgttatttaaaaacaaaaacagaggcaagtcaatattcctcacataatagcatcactggtgcctgaactgaagttcactctctagagtaggagaccaaaagatgattttaaagctgctgggccaggtaatatacttaacctgtagcctttgggacatatgctattgactggctcacagagcatccattcataatccctttgaccctgcatgtctcttctataaaattatgggggaaaatcaaaatactttcttaatgttccttaagtctatggttgtcatgggacaatattttgaaacaattagatgtaagtgtcagtcttctgtttatactagaaagaagagaaaagatttggttggtattgaggatatgagatgaacaagggatattgaaaatgcagtaggatcaatgaattgtagaaattgatgaagtcaatatgacagtaaaccataggaagatctggcaagagaatatgtagagcagactgtaatgccttaaatggagactatggagggattgcagctattgctaatttaaggcctatagtatgaccatggaaatgaataccccaagtaggatagacaaaaaagacgaccagaggcatggaagtcagtatatatctcttaaattgtaaaacatttcatatatacataaaactatgagaataatttttaaacacatcccagatgcccaggtttaacaagtgcaaattcactcaatagaatacaacacaatcattaaagatgaacgttatgaagaacgtgggaaacagcaaaattaacttatggtatattactaactgaaatactaatttaaaatttacacattatttaataaaaagcacatctctacataagtataaaataaaccaaaatgaaaatgttacatgagggtggtgctagtaggattataggtaagtcctaacttagttctgaacttacttgtaatgaggtcctgccacttaaaaaaaaaaaaaaagttccagacacttttaaaaagccatatttattgaagtgcaatgtacatacattataaaggctactatttttaagtgtatagttcaatgagttttaacaaatatgtacagacatgtaactaccaacacaatcaagttgcagaatatttccaacgcttcaaaaacttcccaaggaagcggcaatgctgattggtgggtccaacagaagggctacgggagtacaggacccaagaaaccatcaaacccaatgatgcaagaccctgcctcattccccagcctgggactcgggaacctcccgtaacactggaaagctctactgagtcgagggaaacgcaaacatttccaaccctaatcctccaccggctgccacttttcctcctcaagacagagggccttgaccatctttggtccctcacccaggctgaggaggcgcagaagggtctctaaggctcaagtcttgcatgcagcatgatggccgcaactttccctggagcggaagttcctgcgactcacttcccagagtcaggagtcacaccagagggccacaccctgtagtcccgaagaggaagtgttgtcgactatatgaaacgtctgacccacacttcccagaatgtttaagcggaacgacgacaaggactccaccagcctgggcgaaaatacttccgactacagttcccagaatacccagcacgctagtgcttccaccttcctacagctcattctgttagttaagtgcgttcaaactgaaggtcacttctgtggcgcgattagtgcttggactttttatttttgtaatttttttttcctcaagaaaaaacgagtatgtggaaatataaagaaagtatgactatttggggataaaagcaaaggctttagtatgaaaagaaacacgctttagcggaaaagtgatgagtatgagaaaaaacaagattctaaaagggagttgggctgtccactggacagaaccttaaggaatatggaatctccagacgtggtttaactccgttgcctctttatatgtgcctgtagtcatctagacctctgcttatgctatctggcatggacaatttatttcaagatgacaagaatccacaaggaattccaaggacaaatcagtcttgaaatcaagcacagaaagagcaagttgtatctgaaaaatgaaggaagctgtactggcaggaaatttagaaaatatgatatggaaaatggctcctttcttgaaattttttgagttcaaatcaggcttggaattggctattcctctgttgcccgttgacctcatatatttaacatgaacgtatcttttctacaaatcagtttaagccatgtgaatttatggttattcaggaagaggtgggtaggttgagatgggagacggactccagataactataacaagtcaaactacaggaagtatgtacttaccactttccttctgggcaggaaaaaaaatttttaatgaaactttcgatattaacacaaaaaggcggagcttgcagtgagctgagatcacgccactgcactccagcctgggcgacagaggagactccgtctcaaaaaaaataatagtaataaataaaaaaaaaagaaaaaaggaaatgataacatgaaacaccaaatgcacctaccctaaattcaacacttcccaacattttgccacacaggcaatatctatgactattgaattttgttactgaaatattttaaagcagatccctggccttatcccttcccaatactatctgtatcacttaaaaataatgatgttttaacataaccacaaaaccgttaccttatgagataaaattaacaaatcttagtattatctaatatgcatgccaatttgaatctgttttttggggggaaaatgcttttacagctggtttattccagtcattatccgaacattttgatccattgtatttgattgttatctcaccagaaagtcatttactctaaaactatgcccccaccccgaccctcccacacacagcaccaccaccaccattttttatttccttgaactgttggggaaataaaaatgtcaaattaggtgtctaaattctggatttgtctaaagccttccctatattttctcctctgctcttttaaatgttctgtaaagtagaaatttgatgtaaagtctagattaaatgcaagttattggtttttgcaatacttcatagaagggactggaaatatttgaaacagaaaccatattctcttcaactaaagtcaattcaaatcctcagcaagtttccctctgaagagaaagacaaaaataaataacagcaaatatgcaaaaagagacagattaaaatatggaaaccatcataacaaatcagattctagacttgagtacaatggctcatacctgtaatctccagcactttgggaggctgaggtgggaggactgcttgagtcaaggagtttgagaccagcctgggcaatattgtaagaccttgtctctgcaaaaaatccattaaggtaagctaggtatttgagaccacttttatctcaaaaaaagtttgaggtggaatttgccaattccttatggtaaaaacctgagaagctgatagttggagtctaggac[137 bp omitted]agtgaaaccctgtctctactaaaaatacaaaaattagccgggtgtggtggcgcacacctgtagtcccagctactcaggaggctgaggcaggagaatcacttcaacccgggaagcagagg[134 bp omitted]agctgaatgggaagtaggcccaacctggcagttattcaaacccaaatccaagtcaactcaatccctgaccctgtattgcttgtaaatctggcaaaaataaataaaatcctctgtagagatcctaagcatccaattattttttaaactttttattttaaaataatcacagatttatatgaaattgcaaagatagtagaaagaggtcccatgtacccttcacccagtttcacccagtgattatactgtccttaattaaaatacaacattgaaaccagggaattatattgacaccatgaatatgtgtagttgtatgttatcacttgtagattgatatagctactaccacaatcaagataaataagtattccatcactgcaaagccctccttcttgctacatcttgatagtcacacccagtcccctcccttccaccattcctgatatctggaagcaactaatctgctttccatttctataatttggtaatttcaagaatgttatacaactagaaccataaaatagattcacgtttttcacttagcataattatcttaagacccatctaagttgtgtatcaatagtccattcctttttattgctgagtagtattccacggtatggatgtaccacagtttgtttaacatttacctattaaggaacattttagttgtttccactttttttccattatgaataaagctactatgaacattcatgtacaggtttgtgtgcatttgtttgtgtatgtaagttttcatttctctggagaatatgtccaggagtgaagttatggggttgtaaggtaaggataggtttaattttttaaggaactgccaaactgttttctggagtggctctactactttacattcccaacagaaatttatgagacttcgagtctctttacatccttgccagaatttgacattgttgctattttttattttagctgttctaatagatgtgtagtgatatttcattgtggtcttgatttatatttccctaatgactaatgatgttgattatctttgcatgtgcttctttgtcatatgtatatctttttcattgaagtgtttgtttaaatcttttagcttaaaaaattggattgttttcttattgagttttgagagttctttatatgttctctatacaagacttttgcatatacatgatttgcaaatagtctatcactccctagctggtcttttcatatctgtgtaagagttatgattttatttttcgaaaattatttttttaacagttttgggggtcccacagagatgccaaatagattcatgtaacgaatccaggtaatgtttgtcaccagaaaattacacctcagtgatggtcttaagcccagttgcattgtttcttggctcccagaggtaaatacaaagtgacaatagaaatttgttgatcctctgtttttcgcattttaattttcttctaattttgtgtttcatttttgttttgttttgtgttcacttatagctgataaattttcaccatcactggcaacaataattgggaattttttatgatcttgtttttaaagtgactatcagtgctgctcccaaggttctcaagtttttaagaaactgtccttgtcaaaaggcttatagtcttagacaaatttatatggacacatttcttcagctgctgcaaaatatgattcaactaactcatcatcagtaaataacttttcttgcttgactaacagattagccactctaaaacttactttggttatagcctcattttcattcgctgttttttaaaagtaattcggctttgataagatattccattttggccataattatctgtgatttggaaatattgggaaaagtttctaatctggcagtattaatgttattatttttcttcttgtacagctatctgtcactgcaaaacaaacacaatagtcagccgtctgattctataacaaaataatctacactttactataccttaaaagcataacattcaaaatttgattttctcttcttgttttgacatgatggatatgcaaaataaatgaaatatcaagtagagtgatacatatggcactcaaaaatctgttaacttgtaataactgtgttactgaggtttatgatacactgagtagcagtatgaagtgatgagaacattatatatggtctctatcataagtactcaactgtaccaatataacatgaaaacagccatagacaatatgtaaacaaataagcatgactgtgtttcaaccaaaatttatgaatgctgaaatttgaattttacatacttatcatatgtcataaaatattcttcttttgatttttttgactatttaaaaatgtaggctgggtgcggtggctcacacctgtaatcccagcactttgggaggccaaggagggcagaatgcttgagctcaggagtttgagaccagcctgggcaacatggtaaaaccccatctccacaaaaatgcaaaaattagctggacatggtggtgcatgcttatagtcccagctactcaggaagttaaggtaagaggattctttgatcccaggaggctgatgctgcagtgagccaagataatgccactgcactccagcctgggcgatggagtgagaccctgtctcaataaaaaatgtaaaagccattattacttcatggggcatacaaaaacagtcaatacaccatatttagccattaggccagaatttcccagcaactggcttactctgtcttacccagaaccagaattccaaattgatctataaagtcaacacaatatcaatcaaatttacagcaggctttttgcagaaactaatattaagatttacgttgaaatgcaaaaaacaactaactaaaaaaactagaatagtcaaaattgttttgaaaaggaagaacatcattagaggaataacagtatcagattttaaaacttactctaaagctccagtagtcaagacatagtaatggcttaacaatatttatataaatcaatggaacagggtgattccagaaaatagagccaagtatatatgatcagtttattttcagtgcagccacaaagataattcaatgggggaaagttgtttaaaaaaatagcactagaacaactagacatctatttgaaaattatgaacctcaacacttacctcacatcatacacaaaaagaactcaaaataggtaacagacctaaatgaaaacctaaaactacaaatgttatacaagaaaacataggagaaaattttcaaaaccttgggataggcaaaaaaaagatttcataggtaggccaaaaagagcacaaaatctaatttaaaaagataaaccagaacttcatcaaattaacttactctcttaaagacattattaacaaaatgaagaggcaagccaagactaggaaaaaatattcataatgtatctatctgagaaaggattggtatctaggctatattaagaaatcttacaactcatcattttttatggctgcatagtattccatggtgtatatgtgccacattttcttaatccagtttatcattgttggacatttgggttggttccaagtctttgctattgtgaatagtgctgcaataaacatacgtgtgcatgtgtctttatagcagcatgatttataatccattgggtatatacccagtagccataaaaaatgatgagttcatgtcctttgtagggacatggatgaagctggaaaccatcattctcagcaaaccatcgcaaggacaaaaaaccaaacaccgcatattctcactcataggtgggaattgaacaatgagaacacatggacacaggaaggggaacatcacacaccggggcctgttgtggggcggggggaggggggaggggggagggatagcattaggagatatacctaatgttaaatgatgagttactgggtgcagcacaccaacatggcacatgtatacatatgtaaccaacctgcacgttgtgcacatgtaccctaaaacttaaagtataattaaaaaaaagagaaatcttacaactcaacagtaaggaaccaaactaacaaaaaacaagcaaaactttcaaaagttcttttccaaagaagatataaaatgaccaatcagcacatgataaaatgactgataaccacctcattacttatcagggaaatgctaattaaaccacaatgagataacactacaaataatcccaatgactaaaaatcccaagtgttggttagcatgtagaacaagtgatcttgcattcactgctaatggaagtatgaagtggtatagtcatttttagaaatggtaaagttaaacatacacttagcatattcactgttacttgccttgtaccaaaagtataattcttaaag[138 bp omitted]tgatctctgctaaaaatacaaaaactagctgggcatggtggcgggtgcctgtaatcccagctactcaggaggctgaggcaggagaatcacttgaacctgggaggcggatgttgcagtgagccaagatcgtgccactgcattccagcctggtgacagaacaagactctatctcaaaaaaaaaaaaaaaatggtcagagatttcagtaataaacataaaagataggagactccaggaatggatatacctagtgtagtataaatgtgacctttaagatcagtaaataaaaaagggactcatcaataaatgttgaaagccttgactatccaattggaaaaaattaaaattagatttgtgcctgacaccatttaaaacatagtcttcatgttttgaaaataattagtgcctgggagtatgggaaagttttcttttaaaaaatcattatacaaaaatttcataaacacattgatattttaaccacataaatttttttagctaagttgcccagtctagagtgcagtggctattcacagtcacgattgtagcatccaatagcctcaaactcctgccctcaagtgatccttctgcctccccagtaactgggactacaggtatgtgacaggtatgtgccaccacacacagcccaaccacataaagattttaagtgaacaataaagtacctcattctttatgttaatagacaaggacaggcaattcttcataaagataacatacacttagcctatgacagcaattccactcctaggtatttacccaagagaaatcaaagcatatgtctgcaaaaaggctaatacaagaatattcttagtagctttatccaaaatttccaaaacctggaaacaaatgttcaccaacataagaatgagcaaactgtggtaatttcctgattactctgaacataaaaagaagactgataagcataataatataaatgaacttaaaaacattatgttaaatggtggcagcttctatagaaaacagaatggcagatcctgaaaaaattgaaaatacaattaccatatgatccagcaattccacttctgggtatgtgtccaaaagaattgaaagcaaggtcttgaagagatatttgtactcctatgttcataacagcattattcacaatagccaaaaagtggaagaaacccaagtgtacaaaggaagaaaattctgacacattcgacaacacaaataaaccttaaggacattatggtaagttaaataagccagtcacaaaaagacaaatactgggctggtcatggtggctcacgcctgtaatcccggcactctggggggtcgaggcgggcggatcacaaggtcaggagatcgagaccatcctggctaacatggtgaaaccctgtctctactaaaaatacaaaaaattagccgggcgtggcggcatgcgcctgtagtcccagctactcgggaggctgaagcaggaggatggcgtaaaccctggaggcagagcttgcagtgagccgagatctcaccactgcactccagcctgggtgacagagagagactctgtctcaaaaaaaaaaaaaaaagaaaaagaaaaagaaaaagaaaaaaaaaaggacaaatagtgtatgattccatttacgtgactcagagaagtcaaatgcatagagacacaaagtatagtggctgccagtggctgggaggaggggaaaattgagggttgctgttgaatgggatagagttgaatgggatagagttttagttttgcaagataaaatgagttttggagattggttttacaacaatgtaaatgtacttaacactactgagctatatacttaaaaatggttaagatggtaaatttcatgttatgtatatttcaccagaaaaaaattgtaaaaagccgaaagcattccaggtagctctagtttgcatctaagattaagagacatttatttccatcaaaaccaaggatctgaaaggaaccaatttacaagctcacaagttagcctgacagtctcacagatgctggcacaagacaagagactcctggctctgagacaaaggactttattagtcacaaccacagcagtagccagagtgtcatcctttgcaatggtttttaccactctaatcccatagagtgacgtgaaaggccaggtgctgcttgcatacctagcgggctgcgttgtaggaatagaactctaagcttaggaaacctgaatcttctatgataggcagtgggaacaaaaccactgcccttcaccccagagggagacactgtcttcactggagtggtccataaacaaatttgctgctccagaggaagacactatatttttgttccctaacgcgtacgcacctttgaaaagacagtggggaacaaaggtgaccagtgtctctactcaaagacatgcagaaaaagagaagtagatacttaagtaaccatagtgtctgcagaaaaataaaagaaaaaaaataagagaagcagatacagagaatgagtggggaatgaggaataataactaatgttacattctacttcaaagccagttgactacagaagaaaaaggccaattctggggttacatctcctttgtgagtggtatgctaataaatgtttaataaatggctctccagaaagaaacatacgtacattatataagtttactataaattttactaatatagaatgttttcagaacacaatttataaacaataataaaatatgcaatactctatttattataaattacaaatttagaaaaccatgttgaatgaaaaaaaagccaaacgcaagagtatattacagtatgatttcatttatataaagttcaagaataggcaaaaccaacatatggtgatagaaagcaaaacagtgattatatccttttttggaaagaaatgaagggaaaggggcacaagggaaattttggggtaaagaaaatgtttaacatgttgaatgggcattatttacaaggatatgtacatttgttaaaacttaaatgtagttaaagtctgcactttatgtaaattatacctgaaaaaaaagacaagacagatcagacatcttcggtagctgttattatgcttctatgggcagtctagtggaggcatagccactgggcccagtctgccagctgcatgctatttgtatttattgcctgtagttgtatgaagagctagtgttaagtagtgttaagtagtagttatcagtataactgataacccagcatcagttattaaaatgactattatttctccaacatatttcaaggctaataaactaactcactgtatacatgtggatctgtttttgggctcccaattcttttccattgatctattttttctctcctgagcgaataccacactgtattaattatagaaaatttataataaatgttgatctctggtaatgta[136 bp omitted]acctccacctcctgtgctcaagcgattctcctgcctcagcctcctgagtagctgggattacaggtgcctgccactatgcccagctaattttgtgtatttttagtagagacggggtttcactatgttggccaggctggtctcaaactcctgatcttgtgattcagccaccttggcctcccaaagtgctgggattaggactaagttttatagggaaaacatgtaagctaagggtctggaagagaaggcacaggaccacaatttctcataccacttgaagaagcaccagggcctgggtgaagcaggaaatagaccacacctcaccgctatgtttttatccttcttaaagagcaattgtgaaggcatccatgttggtgagggaacaaattgactatgcaggtaatctggactacttaactaaagcagacaatctggctttagttgtcagagcttcacagaagttgcatgagaaagccaggttctaacacctcccatcaggaagagaaagccgctgggaagttgagttcatgtaaagcccttcccactgaagaatgtgggagtctgaggccccagatagctcctcacctaggcatcccaaagggaactcccagaattacctttggacaattctggtcattgcacacaattgttattgtgaatgaaacattttggctacattttataaaagactcttacatagtaatgctatgaattttcacatgccaatttcgtgtgaaaccaatttgttgacccgataattttaaaacagccttcaattggtcaaattttacaggtggatttgaattttataagtaaataacattattctctagcataaaaatagtatcttccttttccttccaatgattatgtctcaacattttttattttgtcttaatctcaccccatgaatctgggccagtgttgtgacttgctttaatcattaaaatgtggtgaaagtatcattgagcctgttccctgatgaggccttaagagatcacagcttttgcccttgaaaccctggcactatgggaccaaccctcgattggtcttctggagggtgagagaccatgatgacagagagaacttcgttgtctcatctatgaccatcataaaacagccaggcccagatgaaccatcagctgactgcagatgcatgtacaaagcccagttaagataatctagcatgtcccacaccagaactgcccagctaagcccagttgaacttgccagctcacacatcatgagctaaataaatatgtatttagagctactcagttcttgtgtgtgttatgaggcagaagctgataagcatatttaggataaattatacatgagcgagtctgttacgcttttatcaaatcattggatttgacatgctcatatttatttaggatctctgcatcttcatttgtaaatgagattggctcccactgattgggagctagactaatttctgctttttccatgctactttgctacaagaggaaaagcaaacaattttgtgaagtagggagacattcctgttagcatcatatatttaaaaagcttaatgtgatatgcaagcgctgctcccggccaaactagaggattgcctgggacacctccaccaacactgagggctgattctgtcatgaaggaatgttgcacccattctaaaccccaaaagcttcctaggataatgtgtatcccggattttttctctaacttaatgtttgcaagtaggagtactggagtatgtggtggacatggacaataacatgtggacatttttataggtctagatcattgttgatggagccatgttattccattatatgggatgccctaatttactcaatctcttatacatgaaccttcaggttgtttacagtcttctcattgcaaaattcttagaacatatttctttctgaaaccatattttccccactcatgtaattacatcctaaaaatacattctgagaagcaggatcattggctcaaagacaatgcacattgtacatatgatacatatagacaagatcctctccagcaactttgtacctgtttttctttcccccaccaacttatgtaagaacactcatttcctcatttctactgacatagaatttttaaaatatttcactattatccacctgatcagtaagaaaatgacacttcagggatggttttatttgcacttgaatggctgttctgtttacaaactataactagcaggaaactgtaatgcaagaaaaactaggaataaaccatgatccaaatgaagaaacctataagtcaattaaaacaaaaaaggacactgtttttgaaggaaaaaaaaaacaccttgtgggatgagtgcagtggcccaaacctgtaatccctgcactttgggaagctgaggtaggaggatcgcttgaaaccagaagtttgagactaacctgggcaacaaagtaagaccccatctctacaagtacaatttttaaagaaaacatcagctgaacacggtggtgtatgtctgtagtcccagctactcaggaggctgaggcaggaggatcactgaagccaggagttcaaggcttcagcgagcaatgatcaggccactgcactccagccacctgggtgacacagcaagaccctgtttccaaaaaaaaaaaaaaaaaaaaaaagcaaagagatctcctctcgaattcatctattatccccaattaaatgacaaatttggggggaaactgacagaaagagcatcctttaaaaacccattattatacaggtctgctgagaagaagactgcatcagtctgcaatgaacactgttggttttttacatgttgttggtcactttagtaaatgttgattttattcaattaattttattaagactaaccacagaacacctattctagttaatttttaatcgcatttaaggtgtgagctgacaaacctattcagcatcccacattatagagtttctctattatatgagatttcttacgtcggtgggttatacttttcagtaaagttttaccacagctatatcatctggaacatttctctttggtgtactcaccaatgaatgaaggttatcactgaagaagtcccatccataccattttagatggttgcactgccacatcaagccttaaagatttaaaagttttgaactctgaattatgttacttctgtatgtggactccaatgacaatgaaacatattgctataaaatccctccatgctagtcaggatagcctaggcaatgctgcagtaataaataaaccaccaaaaatctcagtggtgagacacaatgaacttttatttcttactctaaaaagaaatccaacacagatgaagtagtgaccttctatcaacccagtctggaataagcagcctccaaggtcaccttggcagggatagagaagcctgaggatgtttgtaaaggctagacctgaaagtggcttatatcacttttgctcacactccattggctagaactcaatcacatgggcacactcttaactgcaagggttactgggaaatagacttcttatttgcaaggaaatggaaccagtgtgataaacacagcactgcctctgccacacccttcaaatgccacttctatggagcttcttgcctgtgtagagaatctcatggaaaacctgggtactaacgttctttcatagtaagagcatgggtttcatttttgagcacacttttgaatgttcttcatacagagagtatttttctactggggactaaaaaaaaatctaaagacgttggctgaactgaagaccttaccatgatcatcccaattagaatttccttcctggacacaccctttaatggaaatttgaccactaactacaaccactaccacaaaccacccatttgtcaaaagtaacctctttgccattgtagcatacagcagttgatgggagcttcacagaagttcttgaaatccacagtccttgcctggcacacttcagtgctgcaggctgacattatcgatggcagtgtccctgtcttttgctcccctagccctcccacaggctgagtaagcctctatcatctggaatacagtgtggcttctgttttactaattgaaccctgacttactacatttataatgtttctctctgctcatgtagtctttgatgagtcagaaggtcctttccacgctcacagtgtgtgtactgtgtctcatctatatgcactctctgatgggcaaggaggtatgaattacgactgaagcccttaccacatgccttacacttatagggcctctctcctgtgtggactctgaggtgaacattaagatctgaattccggctgaagcctttaccacactcatcacatttatatggtttctctctgatgtgatctctttgatgtaagtgaaaatatgaactgtaactgaagcactttccacacacttcacatttatatggtttttctccagtgtgaactctctgatgagtgtgaagaacagagctatacgcaaaatcctttccacacacattgcatttgtatggtttctcccctgtgtggactctctggtgaatgtgaaggtgtgtacattggctgaagccctttccacactcaccacacctatatggtttctcccctgtgtgaaacctccagtggacttgaagaacggagcttgaactaaagcacttgccacactcactgcatttgtagggcttctctccagtgtggactctctgatggacaagaaggttggagctctgatcaaagcccttcccacactcttcacatttatagggctttttccctgtgtgtactccctgatgaatacaaagaagtgacctaaatccaaaccctttcccacattcatcgcatttgtagggcatctcccctgtgtggactcgatgatggttgtgaagggaagagctgcgcctgaagcccttgccacattctttacatttgtagggtttgtctcctgaggagactttctgatatctgggaaggtctgagctctgtttgcagcccataggccattcgtggaattcatagggagtcttgccagagtgagttttacaatgaacgataagatcttggctctgactaaagttctttccatactggtcacatttataagatttttctcctaggtgagtgctgtgatggacatgaggatctgtatcatctgcaaaggccaccccacagttattacatgggaaaggctgtggtaatacatgggccgcattacgtttttcaaccgttgatttcatacccaagtttttcccacagctgggatgtctaccagggtcctctcctttacattcttgggactcatgatgatcacatgaggtccaactgaggctgtcatcatgctgagcacgtctgtacaatttctcttccatgtaaattcccttatatcttccctgagagttctggggctcggtcattatgttggctttcctccacgattctggggtaagaacctgtgtcaggctttgccatgctgtgatatcttgatttttgataatggcatttactacatagttttcattttcagaaatctgaagagaaatgcctgcccactcttcactgagggaaacatcttctaaatgtggggaacactcttcttgaaggttcacgatataatcctgactcacagttaaatcccggatcctttgtttccaaatctgccagcaatgaagcacttcttgcgaaaggtaacttaacccctttgcctgaagattcaaaatgttgtttttaatcccgtctcctaggagaagaaagagaatttggctaagagaacaagtcaatcatccatccagaggttttgagaaaatgtaatatgatggggtgggaagttgtccctgggttctattgacgtatgaaacaattagagccacggtaattctaacctgtgagctgccaattagaaatcaagtgttgtagggaaattaaaagaaatcttggccaggtgcagtggctcatgcctgtaacagcaacactttgagaggctgaggtgggaggatcactcaagcccaggagatcaacaccaggctgggcaatataatgagattcccatctctacaaaaaaattaaaaattggctcagttttgcctatgatcccagctacttggaaatctgaggttggaggattgcttaatcctgggaggcacaggttgcagtgagccaagattgtgccactgcattccagcctgggtgacagagcaagacctttccacccccacaccgcaaaaaggaataaaaggaaatcttaggaaaattttatgaaggaagaaattcacctccctgctataagagtagtcgataaaaagcctttaataatcttgctacaaaaggtatgggaaaggctcccattttatgtagtgtgtgtgtatataaataatacatattgatggagtgttttttatatgttgggcagagtaagggacacaaagggtcacaagaggtttcagaaacaagcaacaagtcctatctcctgatggcttcccttccttcacatcactgtcatatggaggactatcacgtatgtttgtgtacaacctgcacaactgtacatgatgagccttaaggggatggggataaaaaggcaatggggattgaaatggggtaaacattgtgaaatatgatcctggcgttgtgcggggatgcgtatgtaaacctctgagacaagctttaagagacatcctttttattttccccaaggttctttgtcttcatgaaaagatagagaccactcagatcctacaatccatttccttaagttctgcccttttaagttgttgcagaatctcagacagccatgactatgaaaatggggaacagatactgtggcactgtcaatggcctggcacccagggaagcaagactgtggtatataacaaacagggggctgaggcagaagaggatgatcatattcttgggatcctaagatgggttccaaaatggcatgaatatcatggtcaagtcccactggatactgcttctggttcaaggtcctttctgcattgttttattgaaagtgactttagtttataagatagtatcagggaaagggagaccatgagctgccccgaatgggctttaagcagtggtttcccaattgttttgattgtaacccacagtaaaatcagcattatgactcagtaggaataggcacgaacatcaacagagactgctcactaaaacagaagttttatcagctgatacttacatacgatgtgcaatacacttcgataaattcttctgttttctgttctattaatctattttttttctttctttctttattattattatactttaagatttagggtacacgtgcacaatgtgcaggttagttacatatgtaaatatgtgccatgctggtgtgctgcacccactaacacgtcatctggcattgctagttatgacacagtaatttgatttcaggactcaccaagagggttttatcctgcagtttgagaaacaactgcagggatatgcagatttatgcaaaaggtcctgtgtctacagtttacactttggtttcaagaggttatttattaaaaacacaggacctagggccaaattaggatggctcaaatccgagttcttcttataagctgtgtgatcgtgggcaagttattaattctgtgactcagttgtttcatccattgatatggtttggctgtgtccctacacaaatctcttcttgaattgtaactcccataattcccacgtgtcgtgtcccataattcccacatgtcagagcccccacacagagtccctactagggcactgcctattggagctgtgagaagagggccactgtccttcagaccccagaatgctagattcactgacagcttcactgggtgcccagaaaagccacaaacactcaacaccagcccatgaaagcagccagaagggaggctatactctgcagagccacaggggtggagctgcccaagaccatggaaacccacctcttacatgagtgtgatcaggatgcaagacatagagtcaaaggagatcacttttgacttttaagatttgactgccctgttggatttcagacttgcatggggcctgtagcccctttgtttcggccaatttctcccatttggaacagctgtatttacacaatgcctgtacctgcactgtatctaggaagtaaataacttgtttttgattttacaggctcatagatggaagagacttggcttgtctccgatgagacaatggactgtggacttttgagttaatgctgaaatgagttaagactttgtgggactgttgggaggcatcattggctttgaaatgtaaggacatatgatttgggaggggccagtggtgggataatatggtctggctgtgtccccacccaaatctcatcttgaattgtaactcccaaaattcccatgtgtcatgagaggaacctggtagggggtgactgaattatgggggcgggtctttcctgtgttttctcatgatagtgaatgagtctcatgagatctgatggttttaaaaaggggagtttccagctgggcacggtggcttgcacctgtaatcccagcactttgggaggctgaggcgggtggatcacgaggtcaagagattgaggccatcttggccgacatggtgaaatcccatctctactaataatacaaagattagctgggtgtggtggtgcatgtctgtagtcccagcaacttgggaggctgaggcaggagaattgcttgaacttgggaggtggaggttgcagtgagccaagatagcaccactgcactccagcctggctacagagccagactccatctcaaaaaaaaaaaaaaaagatttccctgcacaagctctcttctcttgtctgccaccatgtgagacatggctttcaccttccaccatgattgtgaggcctccccaggcacgtggaactgtaagtccagtacacgtctatcttttgtaaattgcccagtcttggatatgtctttatcagcagtgtgaaaacagagtaatacatccataaaagggggataataacagtaactatctgtattagtccattctcacgttgctaatgaagacatacccaagactgggtaatttataaaggaaagaggtttaattgactcatagttccatgtggctggggaggcctcacaatcatggcagaaggtgaaggaagagcaaagggacatcctacatggtggcaggcaaggagaaagcctgtgcaggagaacacccatttataaaaccatcagatctcatgagatttattcactctcatgagaacagcatgagaaagacccctgccccatgattcagttacctcctaccaggcccctcccacaacatatgggaattataggagctacaattcaagacgagacttgggtaggaacatagccaaaccaaatctgtatctcataaactaaacttaggtaacatataactgtatatgaacctctgagaaatgaaaaggagtttagatatttatcaaaaagtaatcatataagccaacacttagattacacttactacataccagtaagtgttggctattgtaactgccaaccaaaccaaagttctcccttggttcctttaacaccggtttatccaaaacattggataaacattggtttttttctccagaagcaaccaatagatcaaggcccttggtaatgtgtgaattttatcagtctcattctgagaaatatgaggaatgagagcctaaatgtgtgagtaggggagggagggcttacttcctgcactgaatgcccacaggccaggggtatgagatttggggagagctccctcacaaacccatcacaaggggccagatctgtaaaagctcattaactgtaggtttctaacctgcacatgcatctcttaggagttttctttccagtggccaaagtttctctttgtggtctaactggaatattctatctggtttgaaatgatgatttgaggaaacaggtccagtggtctcatgctcagttactcactcactaacatgaggttcctgaagttttccagcatcacatcttggtacaggtttatctgggctttatccaatagtgccagctcttccttggtgaagacaacagccacatccttgaatgtcaccctttcctaaaacatcaaccacatgccacgtcaatcatccacacaaatgactggtcttagtctgtttgggctgccttaataaaacaccacagtctgattagattaaacaaaataaacttatttcttcctgtcctggaggttggaaagtctaagatcaagtaccaccaagataggtttcattcaggtttcttctcttggcttgcagacagctctgctctcactgtgtccttacatggcagagggagaatgagagcaagctctgttgaggctctcataaggacactaatcctattggatcagggattcccaaaggacagtattaatcaaattataaaatatggcccaggaaataggcacagataaatctatactaaggtgttgtgctgatacacaagtctagtagcatttcatgagttcatttctcatcacacaccaagatttagtattttcactttttcatggcagattaatctatttgtattatgttaaaaggaactaagaagacagggtaactaaaagcattggctcctagattcaaaaaacacaaaagagaaatgggagattattaggataattaagaacacttggatatcaactaggtattaaaaaatagtggtatcaatgtgaaatttcttgagtatgttagcagtaatgtggaaatgtaggaaaatgctcttattcttaggagatacaaactgaaatatttagggatgaattatagtaatgcctgcaatttatccccaactgggtcaatcaaataaaatatagacatgtgtgtgtatatatgtatattatacatatgtttgtgggtgattgttaacaattggtgaatctaggtgaagattacacattatgctattctttcgttttcctgataaattgaaatttctcaaaataaaaggatgcgggtaatcatctggtattaataaccatctcctcatgtgtcttttggcagcacaaatgtcttctttcgagaagtgtctgttcatatccttcacccactttttgatggggttgtttttttcttgtaaatttgtttgagttcattatagattctggatattagccctttgtcagatgagtagattgcaaacattttctcccattctgtaggttgcctgttcactctgatggtagtttcttttgctgtgcagaagctctttagtttaattagatcccatttgtcaattttggcttttgttgcatcatcactggccatcagagaaatgcaaatcaaaaccacaatgagataccatctcacaccagttagaatggcgatcattaaaaagtcaggaaacaacaggtgctggagaggatgtggagaaacagggacacttttacactgctggtgggactgtaaactagttcaaccattgtggaagtcagtgtggcgattcctcagggatctagaactagaaataccatttgacccagccatcccattactgggtatatacccaaaggattataaatcatgctgctataaatacacatgcacacgtatgtttattgcggcactattcacaatagcaaagacttggaaccaagccaaatgtccaacaacgatagactggattaagaaaatgtggcatatatacaccatggaatactatgcagccataaaaaaatgatgagttcatgtcctttgtagggacatagatgaaactggaaaccatcattctcagcaaactatcgcaaggataaaaaaccaaacaccacatgttctcactcataggtgggaattgaacaatgagaatacatggacacaggaaggggaacatcacacaccagggactgttgtggggtggggggagtggggagggatagcattatgagatatacctaatgttaaatgatgagttaatgggtgcagcacaccaacatggcacatgtatacatatgtaactaacctgcaggttgtgcacatgtaccctaaaacttaaagtataataaaaaaaaaagaagtactgaaataacctattgggtattatgctgattacctgggtgacaaaattttacaccaaacccccgcaacacataatttacccacgtaacaaacctgcacatgtatcccttgaatctaaaataaaagttggaaagaagaaaagaaaattttaaaaaattaaaaaaaccatctcctcatcaagaaaccaatttttacataaaatatttctatggctgcatatatcgcactgctcagagttaagtatttacagatatgttctctcaatagactctgcatctctaaataaagcagaggtttcaaacaaaagttgtaagcagttacaaaggacttcacaagaacatgttactaacaattgtccaattaccaaaatctgacaatgattaaaaacaaaatctaggggagtcagcacggttgtcctaatagcaccactctctcagtaacactactgtatgccttcttctgtgggaggcaacaaaattgaattggagataatcattcaggaaatacagatacactgaagcttacttggggtgttccaatgtaggaagaaggagttaggaatagaggttcacacagcctactcctcattctcccttctctgcctcagctatagagcctgggaaaacaaaacactcatttctccaccacccttgtagctggatggatcccttgtgggaatcctaggcagcgattgtcataggatgcagatacaaggacagccccaaaatattaagaaaccaaatttataaatgaataaacacatgcaaaaatctttaaatcttttcctctatgaagtattcttgtataaccatctatgaagtatgaatctattcaagcatctggtgcttccacttacaagaaatactgtggatagagtaacacactgaaagacaccaaaaggaagcaaacaaatgcattccaaatgtaggaaagaacacaggacaccaaacttggtttctgcaacaagtcaatagcaggagagaataaagtagaggggcagatttctctagattaaaagacattatgagatacaacaactaactgtatgatagtatagaccttgttaagatcccatttgaacaaaccaactgttaaaaaattttttgagataatcagggaaatttgattattgtctgggtattagataataccaaataattattgattatttcattagtccatttttaaggaaatatatactgaaatacacagagagtgtggtaagttagactgctgtttagaaatatcctcttccatgctctccaatcccactaaaggaccagagtgtgtttccttacccctttagttttgacttggcagtgtaacttattctggctaccaaaatgaagcagaagtgataatgtgccagttctaaacctgggccttgacagatctcacatgtccacttgctctcttgtccctctgtcttcactatgaggacacaaccaagctaaccaaaacgagcagagtgctaccaaatatccatggcattggctttaggtccaggccataaccattgaggacactgttacaggaggctggaaaaatggtgacctgggtgatgcagtggtgaacatttggtgaactgttgctgtaatttagaagatagaaaatgtacctaatgaatcttggacttgggcaagatggtttccaggcagcaggataaaagtgtgaactcattcattttagttgcatatataataaggtactatacaaaagtgatatgctcagagaaaaaccaataccatgtgaaataccatgcctctttcaaatactttgggaaagaaaaaaactgaaaaagagattaagcaattctctttggcaaaaagttaattgttgaaactgcatgatgggtactgcaaatggaggatcataataccatttgctctttttgtgtattttcataattaatttttttcatgattaaaagaaaatccttcctccacactgtgatggtctttctaatgtgtcaacttggctaagctacagtcctcagttattgaatcaaacactaatctaggtattgctatgaagataatttgtagatgtgattaaagtccataatcagttgactttaagggagattattctaactaatctgagtatgtctgattcaataaactgaaaggtcttatgagcagagctgaggcttccctgggagggggagaaattccacccacagacagtagcttcagtctgtgtccaagagttccagcccacccttcctgaggggctgccctgtggattctggacttgcctagttagcccccataatcatataagtcaattccttatgataaatctcttaatatatatctcttactggttctgccttgctgactgaactctgaccaatacatacccattcaaatcttgctacttattgaatgaggccagtcacatttagagtatggtcacgtatatgctgcccatgcactcggatgctgcggcaacaccaaatttctgtaagtttctgaacttactcttgattctttttccctcatcgggcagtgataagcagttcatggactggtactgatacatgaactacacttagagtagcaccaaagtagacatcttgaaatctgtgagtttgtttcttcacttctataaagggagtcaaaccacctgcctcacaaagtcattatgagcagataaagtacctaatacatagtagtcactcaaaaaatgctgacctcctttcagaaaacagaagtgtctggttcctcagaatgaacagcatatttaaagagaaagaaacccttaacttacctggaacttaatcataccgtcttccttttggaaagggcaggattctggaaaagcagaactgcaaagaagaaataatccatgagatcatgggttcaacaagttgtgaatgaacattggttccttccttatctgtacaagtttctcacaatttctcctctcactggatatcatctcttctcgctctgaacagactgaactcccacctcctcaagacttccctagatttgtccccagtccctcaatctcagaccactgtgtaactcctatctctctcctgaagcttttgggtcaaaacctgcacattcttttccttttctgagacttgtgaatgaactgacataatctacatctcaattatgctggaaaagaggctacagaattgctgaataagggagcaatctcagggctgggcacagtggctcacacctgtaatcccagcactttgggaacccgagacgggtggatcacttgaggccaggagttcgagaccagcctggacaacatggtgaaaccctgtctctactaaaaatacaaaattagctgggtgtggtggcggatgcctgtaatcccagctactcaggaggctgaggcaggacaatcacttgggaggcagaggctgcagtgagctgtgattgcaccactgcactccagcctgggcaacagagacagactttgtctcaaaagagaaaaaaaaaaaaaacagaggaaaaaaaaaagagagagcaatctcaggatgacagggaccttctgctatttccactttcgcatgcaagacttgatcttgtatggccaagcctgtggtctaaagaacatgccgttagccaaaatatacaaattaaatcccaatttttattattatgttaatcaataatacaaatttttaaacatctacaccttgactcttggcttcctaaactatctctccagcacccattctatcccctgcttttgcaaatattgatgacacacctatgacatataagacacattctctgttctggaaatgctcatggtatactgaactacacatgttctcagactgcaggtagaccaaagtaggtagacagaggccttctaagcttgccacttcatatacactaaagccccttcctgttctgcttatatcagtggattcccttgccagttagcttccagttgggttcagccaatggggaaagccagcaagagatccagggaagggacaagagtgaagtcagaatatttattcccccaggtttttccctagaggttgctgtggaatggctatattccatatccattgaccaaaggtcatggcctccatcaggcagctgtcatcccataaatctttcttcaggttttagcaactgcctcctcccttagcccttcagtcctaaagtcagtaagttaccctgctatcactagctctgaaatattgcagtatcctttgttgattaccacagcctgcctacaactttatagattgtccctttattaagctcttctcaaattacccaatttgagtgttctgtttattttttattgggattccatctgataaaccctgtaaacacaattgcctctggcctttgtggagaaacttattgtataaaattgccactttaagcactgtggaaacaccgaagattaaaaaacaaaagcccaaagccatgtttctgccttctcagatagtgcttctcacactatctgtgataaaggactagtttttaaattattattactgttactttcagtctgtcacagactgatattctggtaagatacagtaacaagaaattaccagaaaaaggaaatttagaaggtatgcaaattaaagcccaattgttattattatgttaatcaataagacaaaattttcaacatctacactcaagttctcaaattatctggtcacagaccaatatcatttattggcactggtctgtgggctaccctttgaattgcagctcacagggttatagaatcaggttaatagaatgtgaaatgtctttttggtaaatccttggactctttttctctcctttcctacctttaagagacatcattaatcacttcttattttgggctccaacaaaggccaaaataaggagggttcaactcattagtacagcatgaattacatcgttttacaatagttaaaacctaccaagaaaacactcctcctttcccctgtcaaaaaactacaaatcctaaaaaaaaaaaaaaataaccaagctgtagtcttttatccactgtacttggtaaggatcttatcatttaacaagcactcaatcaatgtttctcaatattaacaaatgcacaaatagaattggcttggatattatacattagatgcacgtgcaaagacataaactcaccctctacttccagtacctgttctcactgaagagccaataatgggacaggtttattttgaagcacacatccacacacatgcactcacacatatatggttgggggtttggtttcctgaatttctggcttcagacactacctgcctgtatcaagtcagggccgtggcacgaaccagacggcacattgaaatttgaggagagtttaataaacagacggcttacaatggtgttggctcggggtaaggaaatcacaatggataaggctctatcctggggagtgacagggaggtgccattataatacctgggccttaagaggtaaggggagggagcagtccctggagcctggaactaagaggactgtgtggccagggccacccaaactatgacctgttgtttagaagggcagctaatctgtgacaatcctgcagagagagaactgggggacaagatactccaactcacacttcttcctctctccaaactttcctgttgagacttcccattggccaaagacaagcaaggccagaaggcaatggcggcctttcagggcagacagcagggtggaaaaggtggggagccaaaggcatgggacacatggcacctcaagactcttgttttttccctatctgccaaagtccacacagctctcgcacacaaatgcctttctcatccctcaccctgacaactactctgatctgaggaatgcatcaggaatgagaccagatgcccatatcaacttcttcagggaatgaagacctagaggaaaagtgcagctgaatctggaactgcaattgcccagaaacacgatcagaaatgtaataaatgctgctattacacctaaaataattaacactaaatctctaactttatcaaatatacagagagtgttcaaacttcaaatttgttgagtgtaatttaacaacttatatttgctaatgtgctttataatactcaaagtccctactccctggctcacagcatgtgaggtgagaatggagtta[131 bp omitted]gcctcagcctcccgagtagctgggactacaggcgcctgccaccgtgccc[180 bp omitted]taaactctggagttattacagtattacagtctgagttgtttctttattgccaaaagccagaacctctgccttgaagtcataaatgccccaatggagtcagagctgccaaaatccagagttcagacccaagacaactccccatccaagaacctaggggtgctgagccagaatcgcccccaccaaactgagcgagaacagccgaagccatcctctatatccagagactagctgcttaagcaaatccctcatcccattcagggacgcacagtccagccattactccaaaaccctgagccagcgcccctctgccctcatccagagatgcacatcccaagactgaccctaagcttcgacccgaggaggcacagcgcaagtcgctgtcacgaaacgtgaagatgcactgttttgtcaaacccagggctgctccccaaaccgagcccacgctcgagcccacgctcttcccatcctatcccgggtaggtcgggccgctgaacttccctagtctaccccacctacgaggccttatcattggttaccagtcccctcttccactcctcctacttcagtccacagggacgggtcacagctgcacatcctacactcctactcctggctacgcctccaagaggggcgcggtacagacgggactcaccccagcgtcccaaacaatgtcgcccgcagcgtgcgtccagtaccatggcgcatgcgcaaggaggcctatggcctacaatccccagaaagccccgcgcgcagcagtggccattcgcaaggctaccctggtgaaggtggcctttgacttccgtgcatttggaagtcctttgacttccgtgcattcgtctaaaataacgacaatcataataacgataaaataatgaaatgttaaataaatcactatcaacgatgaaaagaagtttcaatattttactacttggaaatgggcactttaccgttttagtgaagacttttataagttcttattttataggcatgtcttttaacgttaaaaccacgaaacttttcaattaacactcacttaaataattccctccccgccccccaccatgttttatttctgttgatgaaaactctggataatctacacttgcgatataacatagccctgtaatttatttcctagtctcagaagaagcagaaggaattaacaactattgtctgaatccttaacaggggaattgcaggagtactgagagtgtcctaaaagagacacattacaacataacaagaaaacgcgggaagttttcagattctttttgaaaatttgcccttgttgagacttaggctttattttacttcatgttattgcatttaagatttaagatttctattaaagaaaaatttgggtaccctaaatggggtaagaaaattgaataggaattccattagaggcccacagttttagcctggaggaaagccctgataacgtgtgagaacaatctgtctcctaggaaaggtcacctggtcctgctggcagagtctctgtttggaatatctggctggcattcccttttccacgcaccctcaagctgtaggggtggtgaggcggttccagtcctagactagatagagaagtgaagacccccacctctacgcaatgggcaggaaatggttgaataatatccaactatagcttgacatcgcagcttagggcacataaagggacagtgcaattgttttggcttatctctgtcttttgatgtttacatgtttgatgttcttatatattgctctaagttgaaggattacttgatttaatttgacatacttgaattttaaaaaacgagttcaggaacatttttatttttgacctaatacaaggttaatttttgtgacatctgtgtctgttggaaaacaatgtgtcttctctatcagatggatatgcatacatttatattttccccagacttgctaactgtgctatttaaatttcctacatgcttatttgtgcttacttagattttttcattatgcatctgtcaacgattgaaaagtgcatgtcaaaaaggttcccagtctgggcgtggtggctcaagcctgtaatctcagtactttgggaggccgaggtgggcagatcacgcggtgaggagttcaagaccagcctggccaaggtggtgaaaccccatcgctactaaaaatacaaaacttagccaggcatggtggcaagcacgtgtagtcccagctacttgggaggctgaggcaagagaatcacttgaacccaggaggtggaggttgcaatgagccgagatcatgccactgcactccagcctgggcgacagagcaagactctgtcaccaaaaaaaaagaaaaaagaaaaaagtgaaagaaaaaaaagcctataatggtaaatttgtcattttcctctctatagcatttgctttatttatttatttatttatttatttatttatttcctttattttttttttgagactgagtctcgctctgttgcccaggctggagtgcagtggcgccatctcaactcactgcaagctctgcctcccaggttcacaccattctcctgcttcagcctcccgagtagctgggactacaggtgcccgccaccaggcccagctaatttttttgtatttttagtagagacagggttt[142 bp omitted]ggctttactttttaaaagttgtgttgttaggtatggaagtgttgtattccttatctgaaatacttgggaccagaagtgtttcagatattttatttttttcagattttgcaatatttgcatatacgtaatgagatatcttgaggatgagacccaagtctaaatgcaaaattcatttgtgttccatataaaccttatacatgtagcctgaaattaattttatagaattattttgaataattttgttcacaaggtttgtatacaatgtttgtgtgcattgaaccatcagaagcaaagattgccttcgtcagatgaccaaagaaaaatcaatgaaaagaacagaaagaaagcaaatacttcaggtgtggaattttccacttgtggtgtcatgttcacattccaaaagttttagattgtgaaacattttggattttaaaatttagtgatgctgaccctgtgtaagtttcataatgttcatatcttcttgatgggccaaaaatttcgttaacaattttaagtattttgtattttcaccttgagtttacttttcagtgaagactgtacctgctttcttttcattagatttcatctagtatttattctttcattttgtcttaaaattagtatatttctttaccttattatttatatactctttattattatagttatttttaaatgttacttttacctaatctaagagcttggctttagtctgaaaatccacacttaaatgggtgtgttaagaacaaaagagaaagctcttgtataattgatctaggagctgctcatacttcccaactgtagaacagtgaatctggcctgtaatcctagttgctcaagcagctgaggtgggaggatggcttgagcctggaaggttcagggtgtagtgagctatgatggtgctactgtactccagcttgggtgacagcatgagatcttatgtctgaaaaaatagaacagtgaccctcaaacaggaatgaaatagcctccctaagacttttttgaattgtgtgagtgatctttgcttgctccagtgactggggtatgtgtttagtatgcagaggtaaggaatgctaaacatattgcacttgtaaattaattctctcaacaaagaagtcatccattcaaatacccaacagtaaccccttgaaaatcactgctctaaaggaaagaaaatgaacaacaataacctcaatcaaataaaaggagggaaagaaacaatcaaatcagtaaagagaaagtcaaactgctgctgtttgctgatgatatgatcatatacctagaaaaccctaaagactccttcaaaaagcttctagaactcataaatgaattcagcaaagtttcaggatacaaaattaatgtacacaaatcatagctctgttgtacaccaaaagcaaccaagctaagaatgaaatcaagaactcaaccccttttacaacagctgcaacaaaaaatacataggaatatttctaaccaaggaggtgaaagacctctctacaaggaaaactacaaaacactgttgaaagaaaccatagatgacacaaacaaatggaaacacatcccatgtttatgaatgggtaaatcaatattgtaaaaatgaccatactgccaaaagctgtttacaaattcaatgcaagttccatcaaaataccaccatcattctttccagaactagaaaagacaattctaaaattcatatggaaccaaagaagagcccgcagagccaaagcaagactaagtaaaaagaacaagtctggaggcatcacattacctgacttcaaactatactataaggttgtagccacccaaacagcatggtactggtataaaaataggtacaaagaccaatggaacagaatagagaacccagaaataaatccaaatacttacagccaactgatatttgaaa[156 bp omitted]cactaaaaatacaaaaaattagcctggcgctgtggcgggggcctgtagtcccggctactcaggaggctgaggcaggagaatggtgtgaacctgggaggcggagcctgcagtgagccgagatcgcaccactgccctccagcctgggtgacccagcgagactctgtctcaaaaaaaaaaaacaaaaaaaacaaaacaacaacaacaacaacaaaaaccgtattcaacaaatggtgctgggataattggcaagccacatgtagaagaatgtgactggatcctcatctctcaccttatgcaaaagtcaactcaagatggatcaaaaacttaaaacttgaaaccataaaaattccagaaaataacatcagaaaaacccttcaaaacattagcttaggcaaagacttgatgaccaagaacccaaaagcaaattcaacagaaaaaatgataaataggtgggacttaatttaactaaaaattttctgcacagcaaaagaaacactgagcagaataaacagacaacccacaaaggggagaaaatcttcacaatccatacatctgaaaaaggatgaatattcagaatcttcaaggaactcaaacaaattagcaagaaaaatacaaagaatcccatcaaaaaatgggctaaggacatgaatagacaatccttaaaagaagatatacaaatagccaacaaacatatgaaaaaatgctcaacatcacgaatgatcagggaagtgcaaatcagaaacacaatgcaataccaccttacagctgcaagaatggccataataaaagatttaaaaaataatagatgttggtggggctgtggtgaaaagggaacacttttacactgctggtgggaatgtaaactagtgcaaccactatggaaaacagtgtggcaattccttaaagaactaaaagtagaactaccatttgattcaacaattccactactgggtatctacccagaggaaaagaagtcattatatgaaaaagatagttgcacacacgtttatagcaacataataagatgttttataaatataagtgatgaaatccctctattgaaagtttattagagttcatcagcattgatatcatctctcaaaattaaaaaaaaagttttcttttgttgtttgttttggtttttgtttgtttgttttgatgcatggtcttgctctattgcatatatatatatatgtatatatgaatgctattccacaataaagaggaacaaattaatgccattcatagcaacttggatggaattggagaccattattcttagtgaaataactcaggaatagaaaaccaaatattgtttgttctcactcataagtgggagttaagctatgaggatgcaaaggcataagaatgatacaatggacttcagggatggaggggagggaaggatgggagaggggtgaaggaagaaagactacaaattgggtacagtgtatactgctcaggtgatgggtgcaccaaaatctcacacatcaccgctaaagaatttattcgtgtaaccaaatgcaacctgtttctcaaaatcctattaaaataaaaataaatcaaaaaattaaaagccattgcaaataaagacaaaatcagatgttttataaatataagtgataaaatttctctattaaaagtttatagagttcatcagtgttgatattatctttccaaattaaaaaatgttttgtttgttgtttgttttggtttttgtttgtttgtattgatgcatggtcttgctctgttgcttactgcagcctcaacttcctaggcatgagtaatcctcccacctcagtgtcccaagtaagtggaactacaggtgtgcaccatcatgcctaactgatttttaaaaattttcttatagagatagagtctcactgtgttgcctaggctggtctgaaacatgtgtgttcaaacaatcctcccagcttggacagaaaaaatgttggaattacaggcacaagccatcatgtctggacagaatttttttttttttttttttttttgag[135 bp omitted]cacgcccggctaatttttttgtatttttagtagagacgggttttcacc[137 bp omitted]ggatgaaagacataacaaggcactgaaatgaaaaatgacgaaaaggcatcaactatgaccaccttgttatcacaaaaatgaaaaccaacatcatttttacatatcaagttcacaaagattaaacataaatcccttgatcctcaatagtgtgaaaaaatggacacgtttacattttaggctgacagaaaaaaacaaaaacagtttttcctccgctctcacatcacaacaatcaacacagaagatttctgtgacgatatgtctagggatttctctcggtcagtcaagcacacaatccattctgctgtggagagcagctgggtgtcttctaattcatttatgacactatctaactggacatagcattagattccacagggctcagttccgcaagactggcctcccactctaataacaatggcaagccatacgttgttttacctatgctttcatcaactagctataaatcaggtttccaccgctccctattttagttgcattactttcctcgaacagctcacagcacgcagggaaacactgacatttacaactttaccatagcggatattgcaaaaaatccagaaaaaaagattcatgggtcctggcagggggaaggggcgcactactttccaggaagttttacccagaagctctctaaacccagtccttttgagtttctatgaaggcttcactctataggcatgataggttaagccatacgctattggtgatcaactcaaccttcaggcactcaaccctcctggaaaatggggttcaggcactgccattctcagtctgaataatagaatttacataaacagaattttacaacagattagcataactgaaaactgaattagatgattgaattatctggagccacaccttgatattcctaatccaatcaccctcatccaatgaatgctccacccaactggccccgaagtatctagatggttccagagcagaagaatgtttatacaacggatatctcccctttttctcaaaagtcgtttcgcttacacgggtaattcttaaactgccatgcatcagagtcagggggagggcttgttacaacacagatctgtggatctccggggtttgagggttgcaaggatgctgctggtgtcaaaaccacaatgtgagaaccacagaaccactagatggttttcagtgtttcagtgcatttaattcataatatatttcaccaagaaaacttgtaagttcttagattgtcccaaatgtggcgcatgaaatcaaatcaggagaacagtttcctacgcggtgtaacctgggaaagttgggggtgactgatggaaaggaggagtgaagctccgccctttccgctgccaggctgcgcccgcccgaggctatttaaacccaccctggcgggcctgtactcagatcttcacagagcggagcagcggccggagcgttttgcgggctctgcgtggacttggagcttacagcgtcttgcgacttggaagcagattcagaggacaggacagaacacttgggtaagtgaatctctgtctgtctgtctgtctgtctgtctcattggttggtttatttccattttcttaaggagcacatacctcacatcacacacacacacacacacacacacacacacacacacacacacactccttctttctgcgggttagaaaactggtaggcttctctgggagctacaggtttcctaatcatgtctgcacctaagaacagtagggtcttgtctggctcttcttatgaaccgtcccccagcccggactccccaagatccatgctagcctcacccagcttctccctctcccctctcagaaactcagacttaagaggaagctcctcaccagggatccggagctaccgttcaccctcccctagggcttcaccacactcacctctgtcatcaccagaatcccacaagctcccatttccctttcctcaaccgtgatgggcaatcaatgaagccattgggttctcccgcgtcctcctctggggattctttagaatcaccacgttcatcaataatataacacatgttcttactgccatcacccagcagctcacccccggctctctgggaatctcctgtgcctcccagccactctccgaacaaccccggatttcagctggagtcagccccccacacccaggaatcacctacaaactcacgagcctcacggtgctcctcccctgtgtctttcatctcttcacccccaggcctcagggactctcctgtgcctaccagttactctccagccatccccaggtttctgcgggagtcagcctcatgcacccaggagtcccccagagactcacacgtctcgggagattatgagcggtcccccagccctgactcctcaagattcatgcctgcctcacccagcttctccctctcccctcccagaaactcagacccaaggggcagctcctcgccagggatgtggaagtactctacatcatcccgcagggcttcaccactctcacatccatcatcaacagaatttcacaactttacatttccctttcctgaccaagcaggacaatcactgatgtcattgtgctctcccggacaatcactgatgtcattgtgctctcccgtgtcctcctctggagattcttcacagtcacctcattcatcaataatataccatatgttcttactgccatcatccagcagctcacccccagccatcaatgactctcctgtctgtcccagctactctccaactacgcccagatttcagcgggagtcggtctcccactccccagaaacacctacaaactcacagacctcagtgagatcctcgccagtctctctcatgtcttcacccccagcccttacggaccctcctgtctgtcccagctactctccaaccacgcccacatttcagcgggggtcattttcaggaacccagggatcactaccaagctcaccactttcactgagttactccccagtctctagcaggtctttatccccaagcctcagggactctcctgtccgtcccagctactctccaaccacgcccagattgcagctggagtcagttccaggcaccctggaatcaccaccaaactcaccaatttcactcaattactccccagtctctctcatgtcttcaccagccctcagggactctcctctgtgtcccagctactctcataccacgcccacatttcagcaggagtcacttccaggcacccagaaatcaccaccaaactcaccaatttcactcacttactctccagtctctctcatgtcttcaccagccctcagggactctcctgtctgtcccggctactctccaaccacgcccagattgcagctggagtcagttccaggcaccccggaatcaccaccaaactcaccagtttcactgagttactccccggtctctctcatgtcttcacccccagccctcagggactctcctgtgtgtcccagctactctccaaccacgcccagatttcagcgggagtcagttgcaggcacccaggaatcacctacaaactcaccagtttcactgagttactccccagtctctctcaagtcttcaccgccagcctcctgggactctcctgtctgtcccacctactctcccgccacgcccagatttcagcgggagtcagcctcctacactcaggaatcacctacagactcacagacctcactgagatcctccctggtctctctcagctctttgccctcagcccacagggactgttgtgtctctttcagctactctcaaaacttctctagattcccgctggagtcagttccaggcacccaggacacaccagcaaactcaccaatttcactcagttactccccagtctcgctcatgttttcacccccagccctcagggactgttctgtctctctcagttactctccaaccatctccagatttcagctggagtcagcttcccacacccaggaatcacctacaaactcacggaccttactgccaccctcccccatttctttcacctcttcacccccagccttcagggactctcctgtgtctcccagcttctctctggccttccccagatttctgccgcggtcagccccaggcacccaggagaaccctagacactcacaggcctcacgagactatttccctgtgacctgtatctatacaggggtggctcccacgtatccctcagtgaccccaaacccatctccacttacactcagacactcccagggcctgacagctactccccgttattgtccttcagttggaagccctggccaatctactagccaacatgacgcagttacctggccatttctccacattcctggtgagcgccccacacccagccgcagaaaagcccctcctgcattccgtcctcacacacaggcctgtccatctacttgctactgtcacactcttgccagcagaagaggcccctctaatggccgatatcaccgcccaggctatcctcaccccacagctgtgcagcgggaccctcctgctggcccacgtggctgccagagcccatgctgacaccaacctccagcatgtcggcatccctgcgggcgacactaccggtgacatggccagcatgaccctcctccctggcagtgacactgttgatgtgagccccagtttcagatctgtcatttgtaaataggaccattttcccttttctctctcgcttccattcacagggcttttcattctctctgtttctgcctccgtttcagatatttactcacctttttctctttcactatgtctgccgtggtctcgacgagagtgcgccacataagattcccccattaaaagtcatgaattgagtggcttttagtatacttgtggttgtgcacgttcaattttaattcgcaatccatttgagaacattttatcacccccgaccagagaaaaaccctctaaacgtcagtcactcctcattctgtctcaaactctctccctgaccctcaaccctaggtaacaactacatagagcgctcaaccctatctccttagatttccatattgtggacatttcctatcaacagaattataacatatgtgaacttttatgaccgactttacacttagcacaatattttcaaggttcatccacattgtagcattacccacagtgggaaaccattttttttttttttggttttagtaacaccaggtgttttctccttccttctttccttccttccttccttccttccttccttccttccttcctcccttcctcctatttctctcttactccttctgccctctctctttcacatgccttcggtgcatcctactttctgtgtgtttttgggaaatcctcgacagttgcaggaaaattgtgttattgttattatttaccggtatctctctttcatggttctccatcagttgtaaacatctactggtttctcccaagtcactaagtatattttaatgaggtacacctgtttttctttatacagctatttctggagtgtagggtcacatactgataaacccaatgtgacccaaaaacgcatctaataccccaataaacccatcataaagttgaaaaatcataaatcaaaccatcataagtcacggtttgtccgtggatatgggcttcatcaattccattgtattcaataatgctctgcacgattaacaatggcagactgatagggagtggatactgatagcattttaaaaatcagttattagagggatactttaacctgactgaataactgatctaattgtattagtacggtgaataattatgtgaaatgttttgagacagtgtagtacatttgtgaatgaaattttgtggcttttttccacttagtaggaacctttgtgtgtagaaaactgagaagattgctttctgctgtagagtctggcattcgttgtagattaaagcttatttttctgcgaataagccatagtcaataaaatactattctttaaaaaaataaaaaacactggtgatgtgaagtcattatcctcagcaaactaatccatgaacagaaaaccaaaaccacattttcacctataatgggagctgaaaaatgagaacacatggacacaggaaggggaacaacacacactggggcctttcgggaagcagagcgttaagaaaaacagctaatgcatgctgggcttaatccctaggtgatgggtcgacaggtgcagcaaaccaccatggcacacgtttacctttgtaacaaatctgcacatcctgcacatataccccagaacttagaaacaaaacgaaacaaatcaaaaggaaaaaacaataacaaaacgctagtggcaaaataaagtttcaaactgagaaagcgatagagcaatttttggttgaaatcatggttctcaacccaggtgccataaggtcaggataaagaatttgattacgtattgtaaataagacatacagcaaatgactagaaaaattattctcaacatatatgtgccttctaattcaatgatgacgctatctaccgggacatagcattagattccaaagggctcagtcccgcaagactggcctccctctctaataacaatgggaagccctatgttgttttacctgtgcttcttagcaactggctataaatcaggtttccaccactccctgttgtaattgcattaatttgctggaagagctcacagcacgcagggaaatacttccatttaccattttatgatagcggatattgcaaaaaatttagaaaacagattatgggcctggcatgtggggaggggcgcactgccttccaggaagtgttatccacaagctctctaaacccagtccttttgggtttttacggagacctcattctataggcatgatgggttaaaccataggcgattggtgatcagctcaacctgaggctctcaaccctccctggaaattggggttgaggcattgccattctcagtctgagtagaagaatttacacaaacggaattttaagacagattagcaaaactgaaaactgaattagatgattgaattatctggagccacatcttgatattcctaacccgagcaccctcatccaacgaatgctccacccaactggctcctaagtctccacgtggttccagagcaaaagaatgttcctacaacgcatatctcccctttttcttcaaagtcttttcgcttacacgggtaattcttaaactgccatgcatcagggtcagggggagggcttgttacaacacagatctgtggatctccggggtttgagggttgcaaggatgctgctggtgtcaaaaccacaatgtgagaaccacagaaccactagatggttttcagtgtttcagtgcatttaattcataatatatttggccaaaaaaactcgtaagttcttagattgtcccaaatgtggcgcatgaaatcaaatcaggagaacagtttcctactcggtgtaacctgggaaagttgggggtgactgatggaaaggaggagtgaagctccgccctttccgctgccaggctgcgcccgcccgaggctatttaaactcaccctggcgggcctgtactcagatcttcacagagcggagcagcggccggagcgttttgcgggctctgcgtggacttggagcttacagcgtcttgcgacttggaagcggattcagaggacaggacagaacacttgggtaagtgaatctctgtctgtctgtctcattggttggtttatttccattttcttaaggaacccatacctcacaccacacacaaacacacacacacacacacacacaaacacacacccactccttctttctgcaagttagaaaattggtaggcgtccctgggagctacaggtttcctaatcatgtgtgcacttaagaacagtagggtcttgtctggctcttcttatgaaccgtcccccagcccagactccccaagatccatgctagcctcacccagcttctccctctcccctctcagaaactcagacttaagaggaagcttctcaccagggatccggggctaccattcaccatcccctagggcttcaccacactcacctctgtcatcaccagaatcccacaagctcccatttccctttcctcaccatgatgggcaatcaatgaagccattgggctctcccgtgtcctcctctgggcattctttagaatcaccacgttcatcaataatataccacatgttcttactgccgtcacccagcagctcacccccagctctcggggactcttctgtgtctcccagctcctccccagacaaaccagatttctgacccagtcagcctgccgcacccacgaagccgagagacacttacagacctcactggcatcctcccctatgtctcccatctcatcacccccagccccatgctcttaacactgaactatctatgtctcatatatacagcagcaaaacaaaaccagagaaagtggaaagcagataatacagaaaaaacagaggtgaatgaaatgaaaaatataattttctgggaatatatagagaacgcaaatatatttaacaagcagtataaatgctaaataaaactacaacctcagaagaaaccttaggttaatccccaaataggaaatctattctgaatgctctaagagggaaataacaccaaccttcaatgaggtgattattacaataaacttttccagagagcagaacgcgctaggagcttcttattatattactaccacaaatcctagtataattttgataaccaaattataccataatagaacaacaacaactacaacaacaacaaataaagccagaaaactaaaggaaaatgtttcaacgaataggactgcaaaattgtatgaaaagcagcaaacaaaatccagcaatatattgaaatttttacagtacaacagtaatgcatggaaattaatcattactacatttagcaatataaatcatcatattaagaaatattactttctaaaacatatcaccatgaaaataaatgtcaatcaacagtttgaaagtaattttcttgttaatatatataacaggaaaaaagatcaaaacctagaaaaaatacacaaaaagagttcatagataagatgaatacctaaacagaaagaaacaaggagtaaatagcaagggaaatacaaaggaataagcttataagaggatgaagagtcagggagatgtggctcacacccgtgatcccatcactttggtaggccaaggcaggagaatcacttgagcccaggattttgagacaagcctgggcaacatagtgagacctcgactccacaaaaaaaataaaagaaaattatcaggtgcagtggtgcacacctgtagttgcagctactcaagaggctgaggatctcttgaggctctgatccgaccatagcactaaagcctgggtgacaggctgagatcctttctcaaaaaaaaaaaaaaagaaaaaaaaaaagaggatggccaatatctcctacctggaaaaattcacataacgtaatgccataattgttcacctgatggaaaaaaataaaaggattaataagagccaggtttttttgtttgtttttcttttcacatggagtcttgctctttcacccaggctggagtgcagtggcttccgcctcagcctcctgagtagctgggactacaggcgcccaccaccacacccggctaatttttctactatcagtagagacggggcttcacaatgttggccaggatggtctcgatctcttgatctcgtgattcacccgcctcagcctcccaaagtgctgggattacaggtgtgagccattgcgcccggcctaaaatttttttttaattaaaaattaaataactaaaaaatgggtgaaagacatgacaaggcagtgaaaagaaaaatgacaaaaacacatcaactatgaccaccttgactgttagcaataaaatgaaaaccaacatcctttttatatatcaagttgacaaagattaaacatttttattataaatcatgtgatcctaaatagtgtgagaaaatagacccttttacattttaggctcagcgaaaaaaacaaaaactgtttttcctctgctctcacatcacaacaatcaacacagaagattcctgtgacaacatgtctggggatttctctcggtcagtcaagcacaccatccattctgctgtggacgccagctgggtgtcttctaattcaatgatgacactatctacctggccatagcattagattccacagggctcagttctgcaagactcgcctcccactgtaataacaatggcaagtcctatgttgttttacctgtgcttctgaccaactgggtataaatcaggtttccaccactccctgtttcagttgaattaatttgctagaacagctcacaccacacagggaaacacttacatttaccattttattatagaggatgttgcaaaaaattcagaaaaaaagattcatggggcctggcatggggggaggggtgcactaccttccaggaagttttatccagaagccctataaacccagtccttttttgtttttatggaggcttcattacataggcatgatgggttaaaccatcggctattggtgatcaactcaacctcaggctctcaaccctccctggaaattggggttgaggcattgccattcttggtctgagtaatagaatttacataaacggaattttaaaacagattagcataactgaaaacttaattagatggtctaattatctggagccacaccttgatattcctaacctcaccaccctcatcctatgaatgctccacccacctggccccaaagtctctacatggttccagagcagaagaatgtttatacaatgcatatctccactttttcttaaaagtctttttgcttacatgggtaattcttaaactgccatacatcagggtcagggggaaggcttgagagaacctagatttgtggatctccggggcttgagggttgcaaggatgctgctggtctcaaaaccacaacgtgagaaccacagcactagatagttttcaatgcatttaattaataatatatttggccaacaaaatttctaatttcttagattgtcccaaatgcgtcacatgacatcaaatcaggagagcagtttcctaggagatggagcctggaaaagttgggggagacacatgaaaggaggagtgaagctccgccctttctgctgccaggctgcacctgaggctatttaaacccaccctggcgggcctgtgcccagatcttcccagagcagagcagtggctgcagtgtcactgcaatggccaccactgccagaatggtgttacatcagtctattcaaaaggctcattttgttaatgattggcaagccaattccacccaaatgtggaattctcaacaaggcattgatcaaaaattggctaatcaaattaattatttaagacagtctgttacttggcttggagattgggtagtgagtctcaaacatcgaatgcaaatgcagtgtgattggaacacttcagatttctgtatcaccccatgttcctataaagagactgatcattcatggtaaatggtcaaaggacaccttctgggtagggaagataatttatcatttaatttaagataaattaaagaaacaaatttttgaagcttctcaagctcacttatccattgtgcctggagctgaggtgttagatcaggtggcagaaaatctttatggattaaaccccatgacttggattaagtctattgggggctcctctgcagtgaattttggaaatatgtttctctgtttaatcagcttgtctttagtgtgtggaaccagtcaaagaatcctgagtcaaaattgagagaacgaacaagccttcatcaccttggcacatttatataaaaaaaaaaaaaaatgggagagatgttgcgggaagtcagggactccgaacgttgggacaggctgaagccatggcagaagaacataaattgtgaatatttcatggacgtttatcatttccccaatcaatactcctgttttttcctatgcctgtctttaatctcttaatcctgtcatcttcgtaaactgaggatgaatgtcgcctctggaccctgtgatgattgcattatctgcacaaattgtttaaaaaatatgaaatctgggcaccttgaaaaaagaacaggataacagtgatgttcagggaataagggagataaccattagatctggctgcctgagagccaggcagaacacagccatatttctcttctttcaaaagcaaataggagaaatattgctgaattctttttctcagcaaggaacagccctgagaaagggaatgcgttcctaggggtaggcctctgaaattgcagctctggggacgtctgtcttttatggttgcagataagggatgaaataagccctggtctcccgttgcactcccaggccaattaggatgaggaaattcccgcctaataaattttggtcagaccggttgtctgctctcaaaccatgtctcctgataaatgttatcaatgacaatgcatgcccaaaacttcattagcaattttaattttgccccagtcctgtgatctcaccctgcctccatttgtgttgtgatattttattaccttgtgaagtatgtgatctctgcgacccacaccctattcgtacactacctccacttttgaaaatcactaataaaaacttgctggttttgcggcttggaggtgcatcacggaacctgccaacatgtgatgtctcccccagacacccagctttaaaaatttctctctttgtactctttccctttatttctcagaccggccaacacttagggaaaatagaaaaggactcttgttgaatcatcatgggtgggttcccccagtgcataggtatacataggccatggtgatttgctgtatgcatcaacccatcatctacatgtgccatggtgatttgctgcacacatcaacccatcatctacattaggtatttctcctaatgctatccctccccttgccctccacccaccaacaggccccggtgtgtgatgttcccttcccagtgcccatatgttctcattgttcaactcccacttatgagtgagaatatgcagtgtttggttttctgttcctgtgttagtttcctgagattgatggtttccagcttcatccatgtccctgcaaaggacatgaactcattcttttttatggctgcatagtattccatggtgtatatgtgccatattttctttatccagtctatgattgatgggcatctgggttggttccaagtctttgctattatgaatagtgctgcaataaacatacacgtgcattcatctttatagtagaatgatttataatcctttgggtatgtacccagtaatgggattgctgggtcaaatggtatttctggttctagatccttgaggaattgccacactgtcttccacaatggttcaactaattgacactcccaccaacagtgtaaaagcattactatttttccacattctctccagcatctgttgtttcctgactttttaatgatcgccattctaactggcatcagaatgtatctcatcgtggttttgatttacatttctctaatgacccatgatgatgggctttctttcatatgtttgttggccgcataaatgtcttcttttgagaagtgtttgttcatatcctttgcccactttttgatggggttgttttttgcctgtaagtttgtttaagttccttgtcgattttggatattagacccttgtcagatgggtagcttgcaaaaattttctcccattctgtaggttgccagatcactctgatgatagtttcttctgctgtgcagaagctctttaatttgattagatcccatttgttaattttggcttttgttgcaattgctattggtgttttagtcatgaagtctttgcccatgcctatgtcctgaatggtatggcctaggtttatttctagcgtttttatggttttgggttttacatttaagtctttaatcaatcttgagttaatttttgtataaggtgtaatgaaggggttcagtttctattttctgcacatgtctagccagttttcccagcaccattaaatagggaatcctttccccattgctttttttgtcaggtttatcaagatcagatggttgtagatgtgtggtgttatttctgaggtctctgctctgtaccattggtctatatatctgttttggtaccagtaccatgctgttttggttactgtagccttgtagtatagtttgaagtcaggtagcctgatgcctcctctagctttgttctttttgcttaggattgtcttggctatacaggctcttttttgattctatatgaaatttaaagtagttttttctaattctgcaaagaaagtcagtggtaccttgatgggaatagcattgaatctataaattactgtgggcagtatggtggccattctcttgatattgattcttcctatccatgagcatggagtgtttttccatttgtttgtgtcctctcttatttccttgggcagttgtttgtagttctccttgaagaagtccttcacatcccttgtaagttgtattcctaggtattttattctctttctagcaattgtgaatgggagttcactcatgatttggctgtttgtctattgttggtggataggaatgcttgtgaattttgcatgttgattttgtatcctgagactttgctgaagttgcttatcagcttaaggagtttttgggctgagatgatggggtttcctacatatacaattatgtcatatgcaaacagaaacaattagacttcctctcttcctatttgaatatgctttatttctttctcttgcctgattgccccagccagaacttccaatactatgttgaataggagtggtgagagagaacatccttgtcttgtgctggttttcaaagggaatgcttccagattttgcccatttcatatgatattgcctatgggtttgtcataaatatctcactattttcagatatgttccatcaatacctagtttattgagattttttttagcatgaagggatattcaattttatctaaggcctttctttattgagataatcatgtggtttttgtcattggttctgtttatgttatggattatgattattgatttgcgtatgttgaaccagccttgcatcccagggatgaagctgacttgattgtggttgataagctttttgatgtgctgctgaatttggtttgccagtattttatggaggatttccgcattgatgttcatcagggatattggcctgaaattttctttttttgttgtatctctgccaggttttggtttgagggtgatgctggcctcataacatgggttatggaggaatccctctttttctattgtttataatagtttcagaaggaatggtaccagctcctctttgtagaattcggtagaatttggctgtaaatccatctggtcctgggctattttggtgggagactattaattactgccttaatttcagaaattgttattggtctactcagggattcgacttcttcctgatttagtcttgggaggatttatgtgtccaggaatttttccatttcttctagattttctatttatttgtgtagaggtatttatagtattctctgatggtaatttgtatttctgtgggatcagtggtgatatcctgtttataatttttcgttgtgtctatttgattcttctctcttttcttcttcattagtgtagctagttgtccatgtaattttgttaatcttttcaaaaaaccaggtcctggattcattgatttttttgaagaatatttcatgtctctatctccttcagttctgctctgatcttagttatttcttgccttctgctagcttttgaatttgtttgctgttgcttctctagttcttttaattgtgatgttaaggtgttgataggaaggctgggcaccttcctatcaggtagatggtctagagctccagacagcaccaactcctcctcatggcctctttctcctcctacaactcttcattctcaagcctcagccctttcccgagataggaaggacaagaccatgtttcaggttggttgttttctcttgtgaaataccacctcaggcatcagaaagcaaacatacctcccccgctggtaaaaggaaaaagagtgaaaatgtattgtgtgaatacattacatttctatgtgaggcagagtgtgtgattctgttttagagatgaagaaaggaatggtggatctcagacttaaacccaggtcagtacgacttcatgatctgcctttctgctctgcttgctgcctgcctatgatagcttcatgcaagggcccatgcccagattatgcagagagatgactcttaatggttgcactcttagtggttaaaatagggtctgacatagtatctattgactggccaaatgtcagtagtagccattcgagaggctgaatgtgatatacagtcactcctgagggccaaattgcacaatcccatgttacactgtgactctggggttcagtgcaacaggcttaggtgttttcggtattcttagcaacacatctggatgcaagagattgctcaagtcatcttaaaggcatagtgttacttcacaaagcccttattatacttgagatatgtgcattcaggctgacgactgtcctgaagtatagttgcaacttgtttagatccacaaatgcttctgggatattggtatcctttgtatctgaacccaccttaccaaacggccacatcaacttcttggtaggacacaatgttactatcagcatgaaccttatattctgaccagacccatctcccctaccaacccactccagttagagacaacttgcttaatatctgtctctatgtactaccagattttatttccaatgttgtccccacagacgggctgcttttacaactctgcaaatccccttaaacttgtattaacctttctaccatatagcattaaaaaaaatgacaccagagagtaacacctcattttatctcatagaaggcactgaattcctacccctacagtaacccattgcacaacagttgcagctttctctccttaactgtctgtataccttactgccactgaaatcctagcagctgggtggcacctgagtaaactttaggcaaccccgtgagacctcaaggactgcagaccccaaagtagaaaagagacaacacaagtgcacaaggcagactcactgttggcatgtccatcctatccacattagtctcccatgattacataggtggtgtggttttaagatgtgacccctccccttaagtgtagcctagacttagtactcatgaatatagcagaagtgatggtgacttaagagactgggtcataaaaggcaccctggcttctggcttgctctctcctttctgattacttactcggggggatgtcagttgctacaagatgaaggcctttagccctgggaggcccacaaggtgagaaactgagacctctattaacagccagcaaggaactgaaggctcctgcctgaagtgatcttgggagcagaccttgtaggccccagtccagcattcagatgactgcagcccctgccaacatttgacagctgcctccacaacactgggggagatactgcccagaatttgaggagtctgctgacaacctctgggaatacagaatgagttaaacttttcagccacaaactttgaggtctgaggggtgtctgcatttgttctgttggccataaaaccctacatcccaagtgactctgctgcagttccataaattacttttcatccctaccccttgcccccttctgaaaccttatttcccacggtaaatactttggttatctatatataaagtgcctgttccccacctcttgacatgtcttctctctttggcagctccaggcagcagaaggctcagaccagagcagacccaggtctcctgagtcaccaagacagagagcttatcctggaggaacacatgatggtgtgctgccctctacaaaaccaggcttgtgggctcactagttcaagaaggcaggactgaaaaatggaaacaccgtggctcctaattatctagactgcctcatctcctaccagccagcaaaaatgatgtagcctctgagaatatttacatcactcatttgtatgccttatctttggtacagggagttgggtgaacaggagaaaaagccaaaaaagttatagaggttacaacatgaatctttaatcataagggattgttccatcaggctaatttataaaaaatagctctactgttattataaaactgaaagatactttgttacaaagtaaaatacataaaagtacaacatatgtattatacattcagaatcccaccactagagataagtagttatatgtcctctcccacatctttttttctctgttgctctaaacatacacacagaaaaacatactaacaaaatggggtcatgctataattgttgttctaaaactctcctggttcactaaatacttcatgagcaacctgcattgtcattatctgtgtgcctgaagatttctagtggctttccattgcatacatatgcctgaacttatctaaaaaatttcctaccaatggaaactggaatattaacatttgctattttaaaaatgttttaaatttaaaaactccaccttctgcatgcgtttttgcccaagtgggcaactatctcccaagtatcaattactacatatttactgccacttcaaaggttatagaaattgaattgatacgttaatgaattcttttgaaaacaatgcacggattttctctctcaccaataagtacataagacttattacgtccatttttgcactgctataaagaactacctgagactaggtaatttgcaaaggaaagaggtttaactcacacacagttccacatggctggggaggcctccgaaaacttagtcatggcagaacgcaaaagagaaataaggaccttcttcacaaggggacaggagagagacagcgaggaagggctacaccttaaaaccatcagctctcatgagaactcactatcatgagaacagcaagggagaaatctgccctcgtgatccaatcatctcccaccaaggccctcctctgacacgtggggattaaaattgagatgagatttgggtggggacaagagccaaaccatatcagactgtttctacaacccccccccccgcccccactgatgggggatttgatgattctattttaatactgctaacctgcagggtgaaatagcatttgtgatttttaagatacctaatatttgatatgttaaactatgaaatgaactggagcaaaaccattatattcatgacagcaataaaacaaattcctagaaatatgcttaagatgactcagaacctatttttaaccatctctaagaaatattactgagggaccatatgaaatactatcagtggtaaaaaaaaagtcatttttttaaagtgaaaaaaaatcagcatttcaaagacgccacattctttcaaaattaacctataaattcaatgcaatgccaattaataaatttatttaattaataattcaatgcaatgccaatcagattttgctttttgaacctggaaagaagacatatttctgtagtgtactacaactcctctgaaagctgtaaagcttacctgcaagataaaacagtcataaaaacatgataaaaatgtgagacacacacatcacccagatctgccaagagaactttgttcctggtcttctcagagtgacttgtttcaataaatgttaatgttatctttttgtttttataaagcgatctttaaaaagatatgtaccaaactggttttagaaaggtggaaacttgtttctacactgtcccattggtagctatcaacccacacaaagaatctatgtccataattagcaccttggaaacattctcaccacttgtacattgtaaaagctccctcccaggcagattctgatggaagtgaggattattactgaaaccactgctgcactgtttctttaaagcctactccgctgcacaacagactcttaaagactgaagtttgtaactgaagtgctaacctatttatcacacatccaggtgttcccttcctatgcagactagaaaatgtaaaatcatcagtttctcctatagccctcctacatgtcactttcctatggtttttctcctgtgttggctctcagatggatagaaagctctgagtcccagatggaatcctctatgtacatctacttataagggttctcgcctaaatgcactctttggtggttccgcagacctgaggtataactgaagcctttcccacacacaccacacgtatagggcttctctccagtgtggactctctgatgaacatgaagacaggagttgcggccaaagcccttcccacactcctcacatttatagggtttctcaccagtgtggaccctctgatgaccttgaagatgtgagctctgactatagcccttcccacacacgtggcatctgtatggcttctcgccagtgtgcactctcttatgactaaggagacctgagccatatctgaaacccttcccacattcacaacaagtgtagggtttctctcctgtgtgcaacctctggtgggtgcgaagattagagccataactgaatcccttgccacactgatcacacgtatagggcttttttcccgtgtggactcgctgatgtttgtgaaggcttgatgtgcacctaaagccctttccgcactcttggcatctgtaaggtttctcgcctgtgtggactctctggtgaatgagaagccctgagctgtaactgaagcctttgccacactcagcacatttatagggtttctctccagtgtggaccctctgatggataaggaggtcggagctgtagatgaaacccttcccacacacgtcacacacgtagggcctctctcccgtgtggaccctctggtggctgtgaaggtctgaattccgccggaagcccttcccacactcactgcatttatagggtttctctcctgtgtggaccctctgatggatgtggaggtcggagctccggccaaagctcttcccgcactcgcatttgtagggtttctctcctgtgtgcagtctctgatgcatgagaagccctgagctgtaactgaaactcttaccacacacgttacatttgtacagatgctgccccatgtgaactctctggtgagcttgaaggtacgagttgtgactgaaacctttgccacacttgtcacactggtagggcctctcgccggtgtgtgtcttctgatgactgctgaggtgggagctgcagctgaatccctttccacactcgccacagctgtagggcttttctccagggtgaatgtgctggtgtttgtgcagtgcagacttggcacagaagcctttgccacactcgctgcaggtgtagggcttctcccctgtgtgcagcctctgatggacttgaagcactgagctgtaactgaagcccttcccacactcgctgcatttatatggtttctctccagtgtggaccctctgatggacaagcaggtttgaacttcgaccaaatgccttcccacactcctcacatttatagggtctccttcctgtgtgcaccccttgatgaataagaagaaccgatttatacctgaacccctttccacagacatcacatctatagggcatgtctcccacaggggctctggggtggttacgtatgtgcgtgttctgtctgacgccccgaccacgctcaagactcttaacagatttctctcctgtgggaactctttgatgtctgttaagatgggcactgtgcctcaagccctcactaaactcatcatattgacagagtttctctttcaaaggtactcttggatgcgggggaaggtctgcatcgtccctgaagccatttctgtattcgttacttttcaagccattctctccagggttaatgcgatgaagtacagagtttttaatgcagtcttttctgcatttattgcaaccacacggcttgtctatttcagggaatctgtgatcaacatgacaagatatccagcaaaagctgtcatcatcccagttacatttatatactgtgtcttctgtgtcgagatttttacatctttcttgaacatcccctaactggttcacaaacgcttttgcccaagatccttgaatggggattggtcttatagctctccaggctggaaactgttgattttctagaccgataagcccatccccttgtagactgtccaggaaattctcaattggaaaacacggcgtagatgctccttcccacccttgatggggagcagcatcttctgagaactggaagtcttttccttgcagatttactctacagtcttggctcccaggtaattcacctgccacctcttcccagattttgcatgaggagagctctttgtgtgaaaagaaccttaattcttcatcttgaatatactccgtatcctttccattcttgtctcctatgaggttaaagacaattcagagatgagaactagtaaaagactggctcagggacatcagactttcagacttgaactaataatagcctagagaaaaattaggctttatgtatcataactattagagcacttatgtttatgacaagaggaggctcctattaataagttttgaagctaaatgctagtatgatcctattagtaccaaactatgtctcatcatagaattgccaggcaaaaaaagaatttcggaacagatttttatagagaaagttcacttcttcgcttaataatgctgttataactaataatatctgacactattgtaacacttcctatctgccaatgatgtacacatattaactgacttaaacctcagaataatactgaagtagaaaccattatattaccttcattttccaatgatgaaaccaagtcagagagagggtaggtaacctagcacactattccaccatactgtgaggcagtggtggagctggcatttaaatgcaggaagcccacacggccttctccctgcactgtgtctcaggggtgactgtacttctgggtatttgtgagccatacttcaggagggtgccaaattttccaaagtgcaccacctgtgtcatcttgtgtgagcagatgcaataggaatccagaaaatactgttaaggcaggaagacacacaaatatttgacttatgactattacttatgccttgagaacctttggatcccaggctgcaaaggatcaaactgtcatatttaccacagttctggatgattttaaaaatttgtccatgttttctgatattctttattgcctatttttatctttcagggcttgggtaacaagaacctgtttataaccagggactagtacaatactagaagaaagtgagaaattcatctgaggactctcaatattctgggacagtctctgccactggcttgccttctactgcctggctgtttctattagagggacggaagtccagaggtccctcgctcattctgggtatgatattctgtgaaaggcatagagaaaccatgagaaggtaggaactgaacggaagaaatgaagttgcagaataatcatctacaatgctgccaacagtacccacaggcaagacaaggggtgaggaatgggacctcctgtgggcaagctcacttctcactgcccagcaaggctcttgtctccaagacctctaggcctcatggttctcacctggagatgcatttcttggagtttctccatctgttaccccagtcttcaaaaattcctatgttgaaatcctaaatcccaacgtgataccattaggaggtggtgggtcttccggaggtaattaagtcatggaggtggaacccccaggaaagaaattagtgtccttagaaaacagatgcccagagagctcttctctgctacgtgaggacacaaaaggaagtcagctatctgcaccctgacagagggtcctcaccagaacccaactatgctggcaccctgatctcagactgtgccttccagaaataaacttctgttgtttatatgccactcagtctggcaattttttacagcagctgaaactaagagttctataaaaataggatttaacctgtgtaaaaaagccaaaaatatcttctctccaggaacaagaacactccaagaagttcagttccaattacccagaggattcctctcacccactgagagtaggttcctgaaattctcctgcatcacatcttggtacagctgcctctgggtagagtccagcagctctagctcctcctcagtgaagaccacagccacgtccttgaagctcaatggctcctaaaatgaaaaaccattaacacaaacatctactagatgaagacaaactggtgtccacagagcaggtttatagaaataaaaaaatttaaaaatctggattaagaaaatgtggcacatatacaccatggaatactatgcagccataaaaaatgatgagttcatgtcctttgtagggacatggatgaagctggaaaccatcattctcagcaaactatcgcaaggacaaaaaaaccaaactccgcatgttctcactcataggtgggaattgaacaatgagaacacatggacacaggaaggggaacatcacacaccggggactgttgtggggtggggggagtggggagggatagcattaggagatatacctaatgctaaatgacgaggtaatgggtgcagcacaccaacacggcacatgtatacatatgtaactaacctgcacattgtgcacatgtaccctaaaacttaaagtataataataataaaattaaataaataaataaaaatctaaacaataaagataaactgcatatctctaaaaaaagaagacaagatagcaggaagttgttcagcccggtgtgtcaactccagtttattaatgtttggtgccagtaatttcaattctaaccaactgaactaccccagatatgcagcatcaagcaagaaacacatcatatcctgtgctcacttggggcacttttttttggacacagggtctcttactttgtagctcaggatggcatgcactggtgcaatcacagctcactgcagcctcaatctccagggttcaagcaatccccatgcctcactcaacctcccaagtagctaggactacaggcacgcaccaccacatccagctaatttttatttttttgtagagatgggaccttgctatgttgctccggctggtctcaaattcatggcttcaagtgattctaccatcttagcctcacaaagtgttgggattaacaggggtgagccactgatatttggatatttgcccactgatatagtttgggtatttgtccctgaccaaatctcatgctgaactgtaatccccagtactaggaagtgggggtgggaggtgtttggatcatgcggtcagatccctcatgacttggcgctatcttcatgatagtgagttcttgtgagatctggtcatttaaaattgtatggtacctctacccccgccccccaactctcccgccacacttcttgctttaggcatataaagttcctgctctcctttcaccttccattatgactgtaagctttctgaggcctccttagaagcccagcaaatgccagcgcaatgcttcctgtttagcctgcagaactgtgagccaattaaacctcttttctttataaatcacccagtctcgggtttttgttttggtctttttgtttgtttgcttgtttttgagacagagtcttgctctgttgcccaggctggagtgcagtggtgcaatcttgactcactgcaacctttgcttcccgggttcaagtgattctcctgtctcagcctcctgagtagctgggactacaggcatgtgccaccatgcccagctaatttttttgtatttttaatacagacagggtttcaccatgttagccaggatggtctcgatctcctgaactcgtgatctgcctgggtatttctttgtagcaatgccagaatggcctaacacacctagcccactgtgagcacttcttcaggaaatttctctgaactggatcaggtgaatcacctgtctgcacattttataatctgactctgacttgtagattgccaaatttttctccaagaagtctgttacaatttacagttccaacagtgcctagtttactgtgcccatgcctgcatgtaccccgaaaacattctctctgccagaatgatggttctttcccaatcattcactacccttccatcaccaggtaggcaaatcctgctctttgctaccacagcccctcttcccttccacactctttttaagggacttccatgtcaacaactgacagaaatcagctaatttatgtcatgcaaccatctcctcaaccaggtgagacctcaaaagtagcattttgaaccaaggaatttcaaactatgctgtgtccccttcagctacgaatggtggcctgtgtttttaaagctaattgttccagttcagtgagaataaatggcagtcatgtattctgcaatacagtgatcatcaaaatattactgtaatatcattgctgtcttcacttggacagtggcaagctttcttgagaactgcatatgagggctctcagaattatactttgccttcagcatgtccctggagtacctgcgacaaggtattgcaagttaagaatgagatgaatgctttcacttgacttttttatttaagtcatgcatatatttttgatacgaaggaatggtagctatagaaagttttagtgcatattacatggtttgtctctgtccccacccaaatctcatcttaaattgtagctcccataattcccacgtgttatgggagggacctgatgggaggaaattgaatcatggggggtgggtctttcccatgctgttctcatgatggtgaataagtctcacaagatctgatggctttataaacaggaattcccctccacagcctctcttgcctgccaccatgtaagacatcccttgctcttccaccatgagtgtgaggcctccccaaccatgcggaactgtgactcaagcctctttcctttataaattacccagtctcgagtatgtctttattagtagcatgagaacagactaatacagaatgcataccatattactttttcaagaaatattcagtacctataaaataatgttaggcaccaggaattagagagatgagccaaaaagctagagtttcatggagctagtattggcagttcctaaaaccagatccaggtcgtatgattggccatgaggactcacaggagctgatatacagtgacactcatggctaagacttactacggtgaaagaaaataaaacacaatcatcaaggggaaaagacgcatggggtgaacttggaaagaaaccaggtgcaagcttccaagagtcctttcctactgaagtcacacagatatgcttaattcctccaaaaataaattgcaacaaggcctgtgaaatgctgtctatcagagaagatcagcggagactcggtgcccagggttttcattggggcctggacacataggtacctcctgactagcacataccaaagtttcagacttccagaaaagcaggttttcagtagaaaccatattgtttgcagacagtccaggtactgtatgccattcttatcagaagcaatgtttacagaggcaaatgctttgtttgagaaagtaaaactggatctaaattctgaggcataagtagaaattaactgagggaaaacagaggagagaaaattccacacagtgggaacagttggtgaaaacccttaagtggtaagaagcacggcacatgtatcttagcctcaggcaatgccgctgtgaagtaggcggtggccagatcactcagggcctcttaggctacattgatgattttggtctttcccaaaagcaggaaacaaataaacactgaagggtagtttacagtgggtagtgataagattaggtgagctgtcttaaaattatgaacccgacacagcatggaaaaacatagcaatggatcaagtatagatacaaggagaccacattggaggccactgcaatatttacagggagacatgttggcccggactcggacatgggaggattacttcagcctaggagttttacatcagcctgggcaacatggcaagaccccatatctacaaaaaatagaaaaagtagtggcatgtggtagtgtgcacctgtagtcccagctgttcgggaggctgaggtggaagcctgggggttcaaggctgcagtgagctgagaacgtaccactgcactccagcctgggtgacagagagaaccgtgtctcaaacaacaacaactacaaaaaccaacaccaacccaaaaaccaccataaaaaaagggcaccattactaagttctagccaaactttaattccaacaccatttttttaatcaaatttctaaatttcaaaagtaggtgtttaagccaggcacagtggctcctgccggtcatcccagcactttgtgaggccaagatgggaggatcacttgattccaggagtttgagaccagccttggcaacatagggagacctacatctctacaaaaaataaaataagctaggtgtgatggcgcacctgtagtcccagctacttgaggtggaagaatcacttgagcctggggggtcaatgctgcagtgagctgtggctgcaccactgcactccagcctgggtgacacagcgagactgtgtcttaaaaaaaagttggtattcaatgcagatgtacaagtaactcggtgaaccagagcacagaatgcaggagcagtcaggtccatgtgaaatatcaatcaattgctgtatttccttctgtctttgtatttgatatgtatacatacatatatgtgtgtgtatatatatatattttatatatttacatgtacaaacataaatatatatatatttacacacacacaaatgagggtggtattttggttgactcgaaaaagaatgattgatgtaaaaataacattttcataactggctatccatcttgaagaaatgaacttaaatgtcaaccttatgtcatttacaaaaataaattacagttatactagggataaaacattttttcagaccttgctgatgagaaaaacatttttaatataaatattaaagagccatttagatgactttttgattaatctgagaatggataaggtcttttgaaactacatgaaactaaattttcaaaagggaactaataaatcatttaactatataagaaccttaaacttctttacagttaccattaagaaagtaaaaattaagaagacatacatgcagccaacaaacatatttaaaaatggtcaacatgactacagaaatgaaaatcaaaaccacgagataccacctcaccccagtcagaatggctattattaagaagtcaaaaagcaacaaacgctggcaaggttgtggagaaaaaagaacatttatacactgctggtggaaatataaattagtttagacatcatacaaagcagtgtggtgattcctaaaagaacttaaaacagaactaccattcaacccagcaatcccattattgggtatatacccaaaggaatataaattattctaccataaagacacatgcacacacatgttcactgcagcactactgacaatagaaaagacatgaaatcaaactaaatgcccatcaacagtagactagataaataaaatgtggaacatatacaccatggaatactatacagccataaaatagaatgagatcatatcctctgcagcaacatggaaggagctggaggccattatcctaagcaaagtaatgcaggaacagaaaatcaaatactgcacgttctcacttataagtaggaggtaaatgatgagaacgcttagacacacagagggaacaacagacacagaggcctacttgagagtggatagtgggaggagggagaggatcaggaaaaataaataataggcattaggcttattgcctgagtgacaaaataatctgtacaacaaacccccatgccatgcaattcacctatataacaaacctgcctatgtaccctgaacctaaaatttttaaaaaagtaaagattgagagaaaataattataacacttttgataagtgtttagaagggcttctaaaaacatggtaaaaatgaattaatgagaaaataggcaaaagtatttcctaagcaatttactgatgagaaaatacaaatatagccaatatacatatgaaaaagtgcttatcatgtttacaatgcaggaaactgcaaaataaaatggggcatctttgccacatatcctccatcagatgagcaaaaatatttagtactaatcattcttgggattgaatgtgtgcagaacagcaaaaattgctatgatttcttctcaaatattgtggcaataatatattaacagtttacaacgaagtgtgtgacgctgtgaaatagatatttggtctctgtggcatataactccaaaagcccttagaaactccaccgtgatgtctttttctatgctaatgggttgactagtagctggcagctggcaggtagcttcaggatggggctgcttactggaaagaacaaggaaggattagaggattagacttatagtacttccccctcccccaacctccagtgaggggagaggagctgagggtgaagttgatcactggtgcctacctaatgaaactttcataaaaacctaagaggaccaggttcagagaaattctgggaaggtgacatgcccagagagggcatggaagctccatgccccttaccccatacctttgccccatgcatctcttcatctgtatccttttgtgatatcctttataataaaccagtaaacataagtgtttccctgagttctgtgagctgctctagcaaattaatcaaacccaaagagtgggttgtgggaaccccaacttgcagctggttggtcacaagttctggaagcctaaacttgcaactggtgggagggaggagcagtctcttgtgggacagaaccctcaacctgtgggatctgacactacctccgggcagacagtgtcagaattgaaccgaagggcacccagcaaaactgccacaaaactgattgcttacttgaggagaaacccacacacatttggtcacagaagtcttctgcctgtgattattgttgctgagtgtcagaatacaaacagcacttagagtttcagtagctttttccacactaagtatacccctttgggccagcaatattcagacatttacatcatagaatttaaagattaaagaacaggatgcaaaaatcacatgtgtttgtactgtttgtagtgctaaaactggtagtaatcagaactgaatatcttatggtagtaaaatacacactacatggaaagcatacatgtttccatttccttttttttgagatggagtctcactctgtcgcccaggctggagtgcagtggcatgatctcagctcactgcaacctccgcctcccaggttcaagcgattcttctgccttagcctcccgagtacctgagattacaggtgtgcgccaccatgcccggctaatttttttacttttggtagagacagggtttcaccatgttggccagggtggtcttgaacttctggcctcaggtgatctgcccgccttggcctcccaaagtgctgggattagaggtgtgagccaccatgcccagccccatttcctttttaaaaagaaggtaacatatattttcacatgacaaagatattgatggattcacacctctttgttaatgttgggcatattagcgaggacagttgggggaacctaatttatttcattatagaccttggtatggtctgtcttctactaaatctttattttaaaagttataatgaaatatatataaactagtattattaacatggctgagctacagaggtttaatactatgagtgagtatggcagacaacccaaaaacatctccatgggagtcccacagagtctcacagttgtaaactgcacagaccatcttaacacacaggactcaaaaagctacacccactcaatttttgtgtaggggggagcttgctagaaaaagaattaatcagaaattttttaagtgtaaaaaaaatcgcagctaggattggaagaaaaaaacaacttagagcttagcctaaacagatgaatgaacatccaagaagaaagaactgtaaaacaggacaggattctggaacacagtggaaaatggcaaaaagaaagaagaaagaaaagaaaaagaaaaggaagaaggaaggagagaaagagaaagagaaaataaagtgaaagaataggaaggacagatccagaagttacaccatttatccagtaggcattccaggaagaccaactggattaaataatagtaataattgacatcaggcacaaacagaattaatgcccgagagaacagagcaaggaaaataaagtgtgatccatgaaaatgccacacacccaagcataaacacaacagatgcttctagaaaaaaatgacaagaatgaatttagctcaccagaaggtgaatggagaagccacaatacaaagtcctacacaagacttaatacaagaagaaaatgacacaacctgtactgagtccagaaagtgtgaatgaagaattttaagccctggcaacttgcaatttgaacataaaaccaacattcttttttttttttttgagacagggtctcgctttttcacccaggctggagtagagtggcatgatcttggttcactgcagccttgatttccctgggctcaagcaatcctcccacttcaacccccaagtagctgggactataggaatgcaccaccacacccagctaattttttagtatttttgtagagacaagattttaccatgttgcccaggctggtctcgaactcctgagctcaagtgatccgcatgcctcagcttcccaaagtgctaagattacgagccactgcacctggcccacaacattcttaaacttggaaaaatgcagaggatactatagccaagtctttggcgtgggggaacaaaaagactgcatccaaagtctttgtagatgaaattgaggcaaccaacaaataaattcaagtaagaaagttgtggtaaaaggagaggcggtgagcaatgacttaaatacacagaagtgagtctcaactgggggaacttatggtgacgaatcagaagataacaatgacaataacaatataataacaatcagaagatggtaggaagtaaaaacgtgctaattgcttcaactttcacagcaggaagtaatcaataatatttaaaattaaggtacacagtaaaagaagtgaatcaaatcttcaaaattatttcacaatctcttttcataaaaagaaaggtttagaaaataatgtttcatgtgttgaaaaaacatacttaaaattctgcaatggctatgatttttttcagtttaaaagaaaattaagaaatatgtatatactaaaggatagcctatttccatatccctatattttcatttactttatatcgcttgatagcagcttagaatctagacaaaagaacgaatgaaactacaattcactaattcaatagatgaacatggaatccatatcactatatgtgtgtgtacatatatatgtatatatatttgtagatatgtgtacatatatgtgtatatacacatttggctgttatgaatgatgctgcaattatcattctttgcacatttattctgacttagaaaaaattcttagagtgggaaatgctcgaccagaataaggagaacttctagaaaggcagaaatactcctgcagctgtgtggatgtacccatttctccatatcccagctaacagtgcatgttgacctttcaaatctttggctgtctgctagaataatcataaatcttatttcaatgtgtatcattttgattaatagaggcttatagtcttttcatatgattagtgggcattagtttttctctgctcccttcctgaacaagaatgctcaggtctttatgcataaccctcttctgaaaataaggatattaaaattttgtcatagatgaaacttttctaatatgtttttctttttttaactttgtgcatggtatacttttggtagggtctactacatggagaacattacatctataaatgaataacgttccacagaggagaacaacccaggcagcgatgattcagtatttggagagtcatctctctgctaatctaggcttgggcctctgcgtgaagctattgcggtggcaggaaggcatagcggaaaggtagattatcgaatccaattgacctacctgagttcaaatcctggatcccccattcatttcttcatctctaaaacagaatcatactatctgtctcacatcactattttgtggataaatgcaacgagaaatgtattcacccaatacatttttcgctctttttccttttaccgagaagggacgtatgttttctctctgatgcctaaggtggtatttcgggagagaaaagaaaacaacccacctgagacatgatcttctcctccctatcttgggaaatggctgaggcttgagaatgaagagctgtaggaggagaaagaggccatgaggaggagttggtgctgcctgaagctctagatcatctacctggtaggaaggtgcccagctttacagactggtttcttctcacttgaggaaattcctcaacatccaactttttctcctccacactcagtttggattctccccccacccaccccctctattagctgtcacctcttttctcatgccttgaggtcaaagtctccatggtctcttctgctaggttctctgcgagcagcagcaactgtatttattctctggttttcctaagctggagacgcagaagatccaggcctttttcattccggaaactctccaagctctgacaagttcctgtctccacctttactgtccagagcgcgactgcttcccatggtcaggggacctgtaggttcgggagggaactttacttagtcctttcttctgggccccaaggctgtggttcacatcccctggatactattcattcagtagtttacaggacatttactgagtacttgttaggtttagtcccctactctgaaggggctcatagtccacaaagccaagagtgttgcagatgggtaaggacagtcacagaagagtctgtgaggagggtcctgcagctaaattctcagtaaggcacagggcccctcagaagggcagagagaccccacaaatatatgggacctgtgacctgtgaagaaacacctggagaggaaaagctttattaacgcaatactgtttgacttgcaaaaaataaaatacaataaatccccatacttagggattatagaaatcaggatatagattagagccatctttagtcagcgtttttaactttttttgtgccatggccccccttcactaatctgatgatacctaaagatccctactgagaataaagttttaaatgcataaaatgaaatgcaaagaattatatggaaatacaaccttcaaaactattaaaactctgcatggctcactgtgcaagtatagtgccactttattaatacattcaatataaacaataaatttaactacaatttcaaaagagtaatgagcataaacaatactctgaaatatttgcacaaaccagaatatgacataaaaatatctatgatgtatatggatgacaaagtcacaagtactgctaataatattgtggcttagcacctatgttcacaatgaaatgctacttgtgacttagactagtataatttttttcccattcaaattcatggaactcctgagttatgctcatggagcccagggcaagaattccttttcaaaattaagcctcttctgccccgccccaccccccagactgaattaattactctgggatccagcaacacatggtataaattgctggttaccacctttcacacggcctccatggtcagatctctaagtcatcaaaataattgagtcttctttttctttatttacctttcatggctctggcacacgggaagcacttaagggtcctaagcaattctatcagcaggaggtgatgcacacagattgaacaaaactcttacaatctgctcagagctactcgggaggtagtgcaaagacagtggacatgagtttccacccttccccaccttgcctggcctctttcctcttgaaattcaagtctcaaggtcaagttcagacaaacagatacacatacttgggctgtctactctaggacactcactggattttactgcttcaggaactcaaatctccttctttcctctaaccatctgtaccagccctctgcatggcccacagtgacaagcatctttctctctccctcccttcatgcactgccctgaactggggattgccctttgacccaggtgtggacaaccaggcaacacgctaccctcctacacaaaggacaaagggaagagtagaggccagatctgaaacaaggcctccaccgcaatgccacttaaactcaaacttcaggatcctctaggactgcgctttgcaaacttcagtatgtttaaaaatcaccatgagcaatgatgaaaacagactgctagagtccagctccaaagattctaattctgtatctctgcagtagagcccaggagtctgtgttttaaacgtttccaggggatgctgacaaagtgagtccaggggccacacctgaagcaaacttgctaagttaccctcacttcctctgactggctgattttcagggtttccagagacttccggtgggtaaaaattttccttgtgcttcctcctcctatccctgaactcttcaggtcaggaagcctcaagagtcagcacataaagttctctatcttctttcactcccttggtgaacatatccagcctcaggccttcaacacaatctacacactgatgactccatggcaacctgccatctccactcttatgtctaaaaagcaactcaaaaaacatgttcaaaagaaaagtccagatttgcccctagaggtacttctctcctttgaaatgaagaggaaatattctagtcatccttgatttcttcctcgtactctacatccaatccatcagcaaatacctacaaatcagaaccagaatcagattattcttgctgccaccgtccacaccatcatgtctcacctgcattaacgtgacagccccctaaatggcctctgcattcctactcctgttcgtttcagtctacttcctacacagcagctggagtgatcttttaaaaatataaactcatattcttctctggccaaaaccatcattttactcaaaaccttgcaccaaggtcctttcaatggcccaaagaccttacactatcttccttcccaatattcagtttcccacttatcctccctctttctcattctgctcagctctggcttccttgctgttcttcacatgccctcatcaccgggccttcgtgttgttctctttgcctttttcatcagatgcctgcaggcccctcacctgctttgggtccctattcaagcaccattttctcagtgaaattcatccctcattatccttctcaaattggcaaaccagcacttcctacaccctcctctgcttcatttttctccatgaaactgacaccctacctacagtctatttttcttgttgaccatctttctccacccacaagaatgtgaactctatgagggccagtatttcagttggcacctggcacacagcaggtgctcaataaatatttaaatgggagaacgggagtaacctgaactcagcttgctgatatggatccttgggtcctcttgatgtcatcttcacagcagaagtgattttcttctccagttcatggacttagtaatttgggtgctaaggactatgctggctgtgttgggacccaagagtgaacagggcagacaacgactctgtgctcatgcagctgctaacattctaggtggaaatcagcagccataatgaatatctactgtgttccatgtgcttaggatacatttctggactgcatggagctcacattgggggagaaagagggtgacagaaagagttggtacaaaggcagtgggacaaagaagtaatgggaataagagataattgcagaggtagaaataacaaaactaaaagaataattccatgtagggatgaagaggaggagaaataaatatgattctgaggttgaagtctgaggaaaacaggtaaattatgaagttatgataaaataataagatagcaaaagggaaagcagggttttgaaaattgcagctctagtttctcaaaactggagttatcaaaaggtttaggttcgaattctggttcagccactttgtagttatattaacaccacaggagagacttaaccttttgaatgagtctgtacttctgtcaaataaagataatccttacttgcaaaactaaaataatttaagtttttctctctttcacacacacatgcctatgtgaataaacttcaaagcccagtacgtggtacacagaaaatcatcaatatactattaccattgacccaacccagcattaacctaggaatacaggaactcatgcatttagtaaatgtacattcagtgtctaacaacatcttaggagaataaacactagacatacagcagtaaattaagatggaaaaggtaattgttctcatggtgcttactttcgggtgggttaatctctctacaaattaggtgacctttggttgcaaaaagggctatgaagaaaataaagcaaacatgatagattcctgttttccaacaagaatgtaggtgctatcaggtgaacatatgtggcagctgtggaaagagcaacattaaatcaggtggtcagggacagtctctaagagctgcctgacaaataaatcagctgtgaaaaaagctgggatgagacaagtccagaaggaagcataagcgcaaagacctggtttctgtttagaaggtctcctggccaggtcttacctgttaagtttttttaactttttaaaccttagcaactcatctgtgacatggggataatagctaacatacaaacttgctcagaaaattcaatagaaatacattcatttattcaaatatttattggcaagcctggcactgtcctagacaccatggataaataatacctggcatatagtaagcactcagttaatatacaccatcacagttactctaattatttctaccctgcgtttcttcagcatggcgctgaaacagtgtaagcctttactgacccagtgacacactactaggagccaagaagagaatacactaaataaagacactgggaaattcctcaaacctcccccatttctaggggaaggcaggtgtggctaaggggtctgaatgaacatttgtgatatcaatgggatgaagaatgaggtcaccaagagacctggcattgccacaaaagagaaccaaagttcactcacctggagctctagtgtcaagagatgtggggttatttctccttcttttatacaattatctccgagaaacgaacaattccaagaaggaagcctgtgaaagaaaaatgaacagcaggataacatgatttaatcccaattcccaccacgccacagggggaaatctctcagtgccagctggatgtaatctaccccttcctgtaatctaccctcgctacttgcttcaggagccgaggaaaagaacctctcttcctacaggactcagagtacaagggacacgccattcctgatgcccaaagaaaccgtctacaagcctactttcactgcccctttcaggagacaaggagaatcaagacaaaatctcaagattttaatccagagctgactgtcacatgctgtgggacacttacaagtgaaattctgcctgtgtgtgcttaggcggctacaaaaagcagagccagcaacgatacagcaaaccaactcctaggacttgcacagcgcttaatacatttcaaaggataaaattagaacacagggaatcaacttcctgtttacagaaatgacttcgcagaaaactctgaaattactccacaagtgggtgggcggctaccctgagaaaattcatgtcatcgatccgcaactgacacagtggagtctcccgcactgcagatctcatctcaaagccagagctggcctcaaactgcttttccaagcctggactgcgagggctgccgacccgggcccaccccgcacaggcgctcagaatgttcgatacgtgcgcctccttacacccctgcctcaccaggccgagctcatggaaatccgtgggcttcgaccctccgccgcacgttgtcccttcacactggtcctatagagccgatcctaattcccatggcctgacagtacaaccgcatggagatgcacgtctctaagacgcctcaccactgcctaagaagcaatcaaggtgacgcgcccaccggaaacggaagtagtcgactcgaggtgtgggactacctttcccagaaccctccgcagcgcagtccgatcctaggggcgatggtgtcgtaaatgcgcgtccacctcgagtcacgcccactgcgaggcggcgggaggcggcatgcaaggtgtttctgagttgaaaagaatgtctttactcagtactaacatattcgcgttgtagcaaacctgactatattctcaaacaagcccatcatcccatcaccagggatataaagcattattgattttctggtgtaaaagccaactaaatatttatttcaaaagtagttcatattacatgtaaagaatggtttaaaaaaaattcttacttaatccctggtttatgtgagtaaatatgaattcttaagaatcccatttcccaaatggcatcataatattttgtaatcatttcttgccacaggtcatatatcgtggatagttctgtatgtcacaaaagacgtagagatacatagagataataaaaaaacacaaattatttgcaatacttgcctagcattctttagtttttagggaagttacccctttgtcctgcattgaacttacacttctaattttatgatatcaaaactacacacaatcactttctttaatattttcccaatttgatggactaaatatcctgtcttattttcccaatttgacagagtaaatatgcttattaccgattgcatttcattgtcatcttttattgtcatacactctctgtgtatgaatgatatcgcttctaagtgatgaattgctcccccagtttcaacatttataaagtagtttagaaaaaaaaaaaaacaaaaaacttcatctgacaaggtatatcagtcttttcatttgtggcttcttttttttctccagtatgaccaaaaagacattccttagcctgattcccaataagtgcatatctatattcatttcaggctctttcatttttcttttgaatcaccgcgtgattcatttaagtgtatgatatgaaaggaagatggagtttcctgtttcaccaaaggattgtctacttttcttaacaaaatttacataaatattaattctttcctttctgatttaaacggcatcctaatcacttactacattactatatatataatgaaatattttctgggatacaagtgtgttctgaagatagagattgctttttctgtgccatgatgaaaggtttcagttacagtgataactcatttccttatctctccctccttgttgtgtttcaaaaatttcatcctagaagttctagaactctctcttataaacagattatcgaattgttttgataaattctaaaaaattgccaattgactccaaagcatccaagcccttcagatatttggttccaaacccacccctctttgcttgggtagacacagtcctacttcccatcctgtgtcctccagttttacaaatgtctgaatttgctgctattgttcttccctctgtaagtccatcctttcctgtactattaaaatcttactccatatttaagacacaacttgaatataatttcctctatcgagtgtttttgaactctatatcataattcaatgaacagatcagtctgtgattgggagaatttcatgcgagtgtagtggatgttaaataccactctcagaacattctcatttccccgagaaatcaataaattatattactctgggatccagcaacacatggtttaaattgctggttaccacctttcacatggcctccatggtcagatctctaagtcatcaaaataattgactcttctttttctttattttctttatttacctttcatggctctggcacatgggaagcacttaagcaattcaatcaagtgtcttggccgggc[137 bp omitted]attagccgggcatggtggggggtgcctgtagtcacagctagtcaggaggctgaggcaggagaatagtatgaacccgggagaaggagcttgcagtgagccgagatcaaaccactgcactctagcctgggcgacagcgcaagactccatctcaaaaaataataataataaaataaacataaaaataattattttaaaaaggtgtcttgacctggaagctaagagccaacctgcacaaagtgtgggtagatgaatccattccaaggcccaaggtaaatattcagccttcatcctacctcatacaaactgcaaaacactgtagaaaccgtgtgtcaactgaatttgaaactgctgtaatttccgactccctaacagttttgttattgttaagaaaaaataacccaattttaagtaggcaaggtatttccgtagacatatcttaaacgaaaataaacaaataggcaagagacacatgaaatgactctccacatcctcagtcattagggaaatggaagtcaaaacaatggtgctacttcacactcactagaatggtcaggattgaaaagcagaaaataggctgggcacagtggctcacgcctgcatcccagaactttgggaggctgaggtgggcggatcacctgaggtctggagttcgagaccagtctagctaacatggtaaagccccttttctactaaaaatacaaaaaattagctgggtgtggtagcatgcatccgtaatcccagctattcgggaggcagaggttgcagtgagccgagatcgcaccaccgcactccagcttgggcaacaagagtgaaactaaatcacacacacacacaaaaaaaaaacagaaaataaaaaatgctgacgatcatgtaaagaagctgtaacattccggcactgctggtaggaatttcaaaatctacagccatattggaaaataatctggaagatcctcaacatgttaaacatcatagaagtctccaaatgatgcagcaattccacacctaggtatgaaccaagagaaaacatttgtccaaactaaatattgtacaggagtgttcatagcagcattattcaaagaagtagaaatccatcaccttaaacgggtgaatcttatccagggcatccacgtggagacaggggcagacacagggaaagagaatgaggaaatgtctgaaatggaggccgaaagagagacaatgagaaggcctgtgaatggaagaaaccgagcgcagggaaaacagtcatacgtatacatcagagatctgagaacgcgggatcataccgacagtgtcactgccaggaaagggggtcaagctagggatgtccccggtggcgtcgcccgcagaaacacggacaggtttggggttcacgctggcacgggcgccagcagccacgtcagcaggcaggagggtcccactgcacagctgaggggtgatgatagcccaggtggtgatgtcggccatcagaggggcctctcctgccagcaaatgtgtgacagtagcaagtaaaaggacaggtctttgtgtgaggccggaatgcgggaagggctcttctgtggctgagtgtggagtcctcagcaggaatgtggataaatggccaggtaactgcatcacgttggctaggaggatggcaaggacttcgagctgaatgatgataacggggagtgactgtgagaccctgcgaggctctgagtgtaaaagaagatgggtgcggggccccaggggagtatgtgggagccactgctgtgtagatggaggtcgttggggaagaatctggtgagctctgtgaatttccaggggtctcctgtgtgctgggggctgactcttgcagaaaactggggatggttggagagtagctgggagacaggaaagagaccctaaggaatggcggtacaaaggtcagagaggagcaggaggagcacggtgaggtctgtgagtttccaggtgagtcctgtgtgttaggggctggccccaggagaaatctggggattgttggagaggagcagggggatgctggagagtctctgagggatggggatgcagagatgggagacagaggtgaggagcacagggaggtctgtgggttgctaggtgatgccctgagcatgagaggctgactccaagagaaatctgcagatggctggaggggagctgggagacacaggagagcatctgagggctgcagatgagcaaatgggagacatgattaaggagggcaccgacatttgtgagattctcggtgacccccaggtgtggggggctgtgtgttgcagaaaccttgggataatgggagagtagctgggacacacacacaagtagccaagggcctggagtacagagttgggagacatggggatggagccccgtgaggacgctgagtttccaggtgtttctttggtatgggaggctaactagctgagaaaggtggggaggtctgaagagtaactgggaaacgtgggactgtccctagggggtgggggtgaagacatgggacacataggggaggagtgcagtaggaactgtgaatttctgagtgttgcctcggtgtgtcggtttgactgttgtagaaacctggggctggttggagtggagctgggggaaaccagagagtctctgggggatgagtatgaagagatggaacacattggggaggagcacagggaggtcactgagtttctaagtgattgctgcgggagagaggcagaccccgatagatatctggcaatgctgggagagtagctgggacagacaggagagacgctgagggctggtgaggacatgagacagactggggagtaactcagtgaaagtggtgagtttggtgcagatttatgggtgcctggaactgattcccgcggaaatctgggcatggttgaagagtagctgtcacagacagaagagtccctgagggtttaagaattacccgtgtaagtgaaaagacttttaagaaagagtggagatatgcgttgcataaatattcttttgctctagaaccacgtagagacatgggagccagttgggtggagcattcattggatgtgcttggcttaggaatatcaaggaatatcaaggtgtggctccagataattcaatcatctaattaagttttcagttatgctaatctgttttaaaattctgtttgtgtaaattcttttactcagactgagaatggcaatgcctcaactccaatttccagggagggttgaaagcctcaggttgagctgatcaccaatcgcctatggtttcacccatcatgcctatagaatgaggtctccataaaaacccaaaaggactgggtttagagagcttctggataaaacttcccgaaaagtagtgcgcccctccccacatgccgggcccaaaatccgttttctgaattttttgcaatatccgctatcatacaatggtaaatggaagtgtttccctgcgtgctgtgagcacttccagcaaattcatgcaactaaatcagggagtggtggaaacctgatttatagccagttgctaggaagcacaggtaaaacaacgtagggcttcccactgttcttagagtgggaggccagtcttgcgggactgagccctttggaatctaatgctatgtcccggtagatagcgtcatcattgaattagaagacacatgtatgttgagaataatttttctagtcatttgctgtatgtcttatttacaatatgtaatcaaattctttgtcctgactttatggcacctggattgggaaccatgatttgaaccaaaaggtggtctgtcactttctcagtttgaaactttattttgccgctagcgttttgctattcttttttcgttttgttttgtttcgttttgttttcaagttctggggtatatgtgcaggatgcgcagatttgttacaaaggtaaacgtgtgccgtggtggtttgctgcacctgtcgacacgtcacctaggtattaagcccagccatgcaaaagctatttcccttaatgctctccctcccccaaccccaccccatgacaggccccaatgtgtgttgttccccttcctgtgtccatgtgttctcatttttcagctcccattataagtgagaatgtgctggttggtgttgtgttcctggattagtttgctgaggacaatgacttcacatcactagtgttttgtttctattttaaagactagtattttattgaataagatttattcacagaaaaataagctttaatctacaatgaatgccagagtgtacagcagaaagcaattttctcagttttccacacacaagggttcctagtaagtgaaaaaagccataaaatctcattcacaaatgtactactctgtctcaaaacatttcacataattatgcacaacactaatacaattacatctgttactcagtcaggttaaagtatccctctaataactgatttttaaaatgctctcaatatccactccctatcagtctgccattgttaatggtgtacagcgttattgaatacaatggaatccatgaagcccatatccacggacaaaccgtgacttatgatggtttgatttatgatttttcaactttgtgatgggtttattgggacattagatgcatttctgagttacactggctttatcagtatgtgaccctatactccagaaatagctgtataaaggaaaacaggtgtacctaattaaattatactcagtgacttgagagaaaccaatagatgtttacaattgatggagaaccgtgaaagagagataccagtaaataaaaacaataacacaattttcctgcaactgtcgaggatttcccaaaaaaacacagaaagtaggatgcaccgaaggcatatgaaagagagacggcagaaggagtaagagagaaataggaggaaggaaggaaggaaggaaggagaaaacacctggtgttactaaaaccaaaaaaagaaaaaatggtttcccactctgggtaatggtacaatgtggatgaaccttgaaaatactgtgctaagtgtaaagtcagtcataaaagctcccatattgtataattctgttgataggaaaagtccagaatatgcaaatctatggatatagggttgagcgctctatgtaattgttacctagggctgaggatcggcgagatggtttgagacagaatgaggagtgactcacgtttaccgggtttttctctggtcgggggtgataaaatgttctcaaatggattgcgaattaaaattgaacgtgcacaaccacaagtatactaaaagccactcaattcatgacttttaatgggggaatcttatgtggcgcactctcgtcgagaccacggcagacatagtgaaagagaaaaaggtgagtaaatatctcaaatggaggcagaaacagagagaatgaaaagccctgtgaatggaagcgagagagaaaagggaaaatggtcctatttacaaatgacagatctgaaactggggctcacatcaacagtgtcactgccagggaggaggatcatgctggccatgtcaccggtagtgtcgcccgcagggacgccgacatgctggaggttggtgtcagcatgggctctggcagccacgtgggccagcaggagggtcccgctgcacagctgtggggtgaggatagcctgggcggtgatatcggccattagaggggcctcttctgctggcaagagtgtgacagtagcaagcagatggacaggcctgtgtgtgaggacggaatgcaggaggggctcttctgcggctgggtgtggggcgctcaccaggaatgtggagaaatggccaggtaactgcgtcatgttggctagtagattggccagggcttcgaactgaaggacaataacggggagtagctgtcaggccctgggagtgtctgagtgtaagtggagatgggtttggggtcactgagggatacgtgggagccacccctgtatagatacaggtcatagggaaatagtctcgtgaggcctgtgagtgtctagggttctcctgggtgcctggggctgacagcggcagaaatccggggaaggccagagagaagctgggagacacaggagagtccctgaaggctgggggtgaagaggtgaaagaaatgggggagggtggcagtaaggtccgtaagtttgtaggtgattcctgggtgtgggaagctgactccagctgaaatctggagatggttggagagtagctgagagagacagaagagcccctgagggctgggggtgaaaacatgagtgagactggggagtaactgagtgaaattggtgagtttgctggtgtgtcctgggtgcctggaactgactccagctggaatctagagaagttttgagagtagctgaaagagacacaagagtccctgtgggctgacggcaaagacctgagagggaacgcggaggatctcagtgaggtctgtgggtctgtaggtgattcctaagtgtaggagtctgacgcccgctgaaatctgggcatggctggagagtagcggggacagacgggagagtcccagggggctgggggtgaagatatgagagagactggggagtaactcagtgaaactggtgagtttgtaggtgattcctgggtgcctggaactgactctcgctgaaatctgggcgtggttggagagtagctgggacacacaggagagtccctgagggctgggggtgaagacacaaaagagactggggagtaactcagtgaaactggtgagtttggtggtgattccggagtgcccggaactgactccagctgaaatctgggcgtggttggagagtagctgggacagacaggagagtccctgagggctggtgaagacgtgagagagactggagagtaattgagggaaactggtgagtttggtggtgatttctgggtgcctggaactgactcccgctgaaatgtgggcgtggttggagagtagctggggcacacaggagagtccctaagggctggtgaagacatgagagagactgggaagtaatgcagtgaaattggtgagtttggtggtgatttctgggtacctggaactgactcccgctgaaatgtgggcgtggttggacagtagctgggacagacaggagagtccctgaggcttggggataaagacgtgctagagactgcggactaactcagtgaaagtggtgagcttggtggtgatccctgggttcctggaagtgactcccgctgaaatgtgggcgtggttggagagtagctgggacagacaggagagtccgtaagggctgggggtgaagacatgagagagactggcgaggatctcactgaggtctgtgagtttgtaggtgtttctggggtgcgggacaccgactcccgctgaaatctggacgtagttggagagtagctgggacagacaggagagtcatggatggctgggagtgagctgctggatgatggcagtaagaacatatggtatattattgatgaatgaggtgactgtgaagaatctccagaggaggacacgggagagcacaatgacatcagtgattgtcctgcttggtcaggaaagggaaatgtaaagttgtgaaattctgttgatggtggatgtgagagtggtgaagccctgcggcatgatgtagagtacttccacatccctggtgaggagctgccccttgggtctgagtttctgggaggggagagggagaagaagctgggtgaggcaggcatgaatcttgaggagtcagggctgggggaccgctcataatctcccgagacctgtgagtttctgggggactcctgggtgcatggggcggactctcgcagaaacctggggatggttggagagtaactgggagacacaggagagtccctgaggcctgggggtgaagagatgaaagacacaggggaggagcaccgtgaggctcgtgagtttgtaggtgattcctgggtgtggggggctgactccagctgaaatctggggttgtttggggagtagctgggagacacgggagactccccgagagctgcgggtgagctgctgggtgatggcagtaagaacatgtggtatattattgatgaacgtggtgattctaaagaatccccagaggaggacgcgggagaacccaatggcttcattgattgcccatcacggtgaggaaagggaaatgggagcttgtgggattctggtgatgacagaggtgagtgtggtgaagccctggagggtggtgaattgtagctccggatccctggtgaggagcttcctcttaagtctgagtttctgagaggagagagggagaagctgggtgaggctagcatggatcttggggagtccgggctgggggacggttcataagaagagccagacaagaccctactgttcttaggtgcagacatgattaggaaacctgcagctcccaaggacccctaccaatttcctaacccgcagaatgaaggagtgtgtgtgtgtgtgtgtgtgtgtgtgtgtgtgtgtgtgtggtgtgaggtatgtgctccttgagaaaatggaaataaaccaaccaatgagacagacagacagacagagattcacttacccaagtgttctgtcctgtcctctgaatccgcttccaagtcgcaagacgctgtaagctccaagtccacgcagagcccgcaaaacgctccggccgctgctccgctctgtgaagatctgagtacaggcccgccagggtgggtttaaatagcctcgggcgggcgcagcctggcagcggaaagggcggagcttcactcctcctttccatcagtcacccccaactttcccaggctacaccgcgtaggaaactgctctcctgatttgatttcatgcgccacatttgggacaatctaagaacttacgagtttttttggccaaatatattacgaattacatgcactgaaacactgaaaaccatctagtggttctgtggttctcacattgtggttttgacaccagcagcatccttgcaaccctcaaaccccggagatccacagatctgtgttgtaacaagccctccccctgaccctgatgcatggcagtttaagaattacccgtgtaagtgaaaagacttttaagaaagagtggagatatgcgttgtataaacattcttttgctctggaaccacgtagagacttgagagccagttgggtggagcattcattggatgagggtgcttggcttaggaatatcaaaggtgtggctccagataattcaatcatctaattaagttttcagttatgctaatctgttgtaaaattccgtttgtgtaaattcttttactcagactgagaatggcaatgcctcaacctcaatttccagggagggttgagagcctcaggttgagttgatcaccaatcgcctatggtttcacccatcatgcctatagaatgaggtctccataaaaacccaaaaggactgggtttagagagcttctggataaaacttcccggaaggtagtgcacccctccccacatgccgggcccaaaatctgttttctgaattttttgcaatatccgctatcatacaatggtaaatggaagtgtttccctgcgtgctgtgagctcttccagcaaattcatgcaactaaatcagggagtggtggaaacctgatttatagctatttggtgagaagcgaggtaaaaaaaacatagggcttcccattgttattagagtgggaggccagtctgcggaactgagccctgtggaatctaatgctatgtccaggtagatagtgacataatggaattagaagacacccagctggtgtccacagcagaatggattgtgtgcttgactgactgaaagaaatccccagacatgtcctcacagaaatcttctgtgctgattgttgtgatgtgagaacggaggaaaaacagtttttgtttttttcactcagcctaaaatgtaaacgtgtccagtttctcacgctattgaggatcacgtgatttataataaaaatgtttaatatttgtcaaatttatgtataaaaaggatgttggttttcattttattgctaacaatcaaggtggtcatcgttgatgccttttcatcatttttcttttcactgcgttatgtctttcaccc[184 bp omitted]ccgggcgtggtggcaggtgcctgtagtcccagctactggggaggc[144 bp omitted]aactccattctcacctcacatgctgtgagccagggagtagggactttgaggattataaagcatatgagcaaatgtaagttgttaaattacactcaacaaatttgaagtttgaacgctctatgtatatttgataaaattagagatttagtgttaattattttaggtgtaatagcagcatttattacatttctgatcgtgtttctgggcaattgcagttccagattcagctgcacttttcctctaggtcttcattccctgaagaggttgatatgggcatctggtctcattcctgatgcattcctcagatcagagtagttgtcagggtgagggatgagaaaggcatttgtgtgagagagctgtgtggactttggcagatagggaaaaaacaagagtcttgaggtgccatgtgtcccatgcctttggctccccgccttttccaccctgctgtctgccctgaaaggccgccattgccttctggccttgcttgtctttggccaatgggaagtctcaacaggaaagtttggagagaggaagaagtgtgagttggagtatcttgtcccccagttctctctctgcaggattgtcacagattagctgcccttctaaacaacaggtcatagtttaggcggccctggccacacagtcctcttagttccaggctccagggactgctccctccccttacctcttaaggcccaggtgttataatggcacctccctgtcacttcccaggacagagccttatccactgtgacttccttacccccagccaacaccattgtaagccgtctgtttattaaactcccctcaaatttcaatgtgccatctggttcgtgccacggccctgacttgatacaggcaggtagtgtctgaagccagaaattcaggaaaccaaacccccaaccatatatatgtgagtgcatgtgtgtagatgtgtgcttcaaaataaacctgtcccattattggctcttcagtgagaacaggtactggaagtagagggtgagtttatgtctttgcacgtgcatctaatgtataatatccaagccaattctatttgtgcatttgttaatattgagaaacattgattgagtgcttgttaaatgataagatccttaccaagtacagtggataaaagactacagcttggttattttttttttttttaggatttgtagttttttgacaggggaaaggaggagtgttttcttggtaggttttaactattgtaaaatgatgtaattcatgctgtactaatgagttgaacactccttattttggcctttgttggagcccaaaataagaagtgattaatgatgtctcttaaaggtaggaaaggagagaaaaagagtccaaggatttaccaaaaagacatttcatattctattaacctgattctataaccctgtgagctgcaattcaaagggtagcccacagaccagtgccaataaatgatattggtctgtgaccagataatttgagaacttgagtgtagatgtttaaaattttgtcttattgattaacataataataacaatcaggctttaatttgcttaccttcttaattttctttttccagtaatttcttgttactgtatcttaccaaaatatcagtctgtgacagactgaaagtaaccgtaataataatttaaaaactagtcctttatcacagttagtgtgagaagcactatctgagaagacagaaactggttttggccttttattttttaatcttcggagtttccacagtgcctaaagtggcaattttatacagtaagtttctccacgaaggccagaggcaattgtgtttacagagtttatcagatggaatcccaagaaaaaataaacagaacactcaaattgggtaatttgagaagagcttaataaagggacagtctataaagtcgtaggcaggctgtggtaatcaacaaaggatactgcaatatttcagagctagtgatagcagggtaaattactggctttaggactgaagggctaagggaggaggcagtcactaaaacctgaagaaagatttatgggatgacagctgcctgatggaggccatgacctttggtcaatggatatggaatatagccattccacagcaacctctagggaaaaacctgggggaataaatattctgacttcactcttgtcccttccctggatctcttgctggctttccccattggctgaacccaactggaagctaattggcaagggaatccactgatataagcagaacaggaaggggctttagtgtatatgaagtggcaagcttagaaggtctctgtctacccactttggtctacctgcagtctgaggatatttatagctcagtatactgtgagcatttgcagagcagagaatgtgtcttatatgtcataggtgtgtcatcaatacttgcaaaagcaggggatagaatgggtgctggagagagagtttaggaagacaagagtcaaggtgtagatgtttaaaaatttgtattattgattaacataataataaaaatcgggatttaatttgtatgtcttggctaactacaagtccttcagaccacaggcctggccatacaagattaagtcttgcaaatgaaagtggaaatagcagaaggtcgctgtcatcctgagattgctctcttttttttttttttttgagacaaagtgtctctctgttgcccaggctggagtgtagtgatgcaatcacggctcactgcagcctccgcctcccaggtgcaagtgattgtcctgtctcagcctcctgggtagctgggattacaggtgcccgccaccatgcccagctaattttgtatttttagtagagacagggtttcaccatgttgtccaggctggtctcaaattcctggcctcaagtgatccacccgtctggggttcccaaagtgctgggatcacaggtgtgagccactgtgcctagccctgagattgctctcttaatcagcaattccagagcctcttttccagcggaattcagatgtagactatgtcagttcattcacaagtctgagaaatggaaaacaatgtgcaggttttgacccaaaagcttgaggagagagacaggagttacacagtggtctgagattgagggactgggttcgaatcgagggaagtcttgaggaggtgggagttcagtctgttcagagtgagaagagatgatatctagggagaggagaaagtgtgagaaacttgtacagataaggaaggaaccaatgttcattcacaacttgttggatccatgatctcatggattctttcttctttgcagttctgcttttccagaattctgccctttccaaaaggaagacggtatgattaagttccaggtaagttaagggtttctttcactttaaatatactgttcattctgaggaacgagacacttctgttttctgaaagaaggtcagcattttttgagtgactactatgtattaggtactttatctgctcataatgactttgtgaggcaggtgatatgactccctttatagaagtgaagaaacaaactcacagatttcaagatgtctactttggtgctactctaagtgtagttcatgtatcagtaccagtccatgaactccttgtcactgccccatgagggaaaaagaatcaaaagtaagttcagaaacttttatagcaatttggtgttgccgcagcatccgagtgcatgggcagcatatacatgaccatactctaaatgtcactggtctacttcgataagtagcaagatttgaatgggtatgtattggtcagagttcaaccagcaagacagaccaataggagatatattttaaaagatttattgtaaggaattggcttatatgattatgggggctaactaggcaagtccaaaatccatagggcagcccctcaggaagggtgggctggaactcctggacacagactgaagctactgtctgtgggtggaatttctccccctcccagggaagcctcagttctgctcataagacctttcagtttattgaatcagacatactcagattagttagaataatctcccttaaagtcaactgattatggactttaatcacatctacaaattatcttcatagcaatacctagattagtgtttgattcaataactgaggactgtagcttagccaaattgacacattaaaaagaccatcacagtgtggcagaaggattttcttttaatcatgaaaaatttaatgatgaaaatacacaaaaaagggcaaagggtcttatgatcctccatttgcagtacccatcatgcagtttcaacaattaactttttgccaaagagatttgcttaatctctgtttcagtatttttctttcccaaagtatttgaaagaggcatggtattttacactgtattggtttttctctgagcatatcacttttgtatagtaccttattatatatgcaactaaaatgaatgagctcacacttttatccttctgcctggaaaccatcttgcccaagtccaagattcattaggtacattttctatcttctaaattacagcaacagttcaccaaatgttcaccactgcatcacccaggtcaccatttttccagcctcctgtaacagtgtcctcaatggttttggcctggacctaaagccaatgccatgaatatttggtagcactctgctggttttggttagcttgggtatgtcctcatagcaaagacagaggggcaagagagcaagtgggcatgtgagatttctcaaggcccaggcttagaactggcacattatcacttttgcttcattttggtagccagagcaggttacattgccaagtcaaaactaaagaggtaaggaaacacactctggtcctttagtgagattggagagcatggaagaggatatttctaaatagcaatctaatttaacacactctctatgtatttcagtatatatttccttaaaaatggactaatgagataatcaataattatttggtattatctaatacccagacaataatcaaatttccctgattatctcaaaaaaattttgacagttgctttgttcaaatgggatcttaaaaaggtctatactatcatatagttggttgttgtatctcataatgtcttttaatctagagaaatctgcccatctactttattctctcctgctgttgacttgtcgtagaaaccaagtttggtgtcctgtgttctttcctacatttggaatgcatttgtttgcttccttttggtgtctttcagtgtgttactctatccacagtattttttgtaagtggaagcaccagatgcttgaatagattcaggttcaaggttttacaagaatatttcatagatggttttacaagaatacttcacaaaggaaaagatttaaagatgttttgcatgtatttattggtttataaatttggtttcttaatatttgggggctgtccttgtacctgcatcctatggcattccctgcctaggattcctaccaccccaagtaggcttcagggtatctgtatttcctgaatgattaattccaattcaattttgttgcctcccacagaagaaggatacagtagtgttactgacagagcagtgctattaggacaactgtgctgactcccctagattttgtttttaatcattgtcagattttggtaattggacaattgttagtaacatattctttttgaagtcctttataactgcttacaactttcgtttgaaagctctgctttatttagagatgcagaatctattgagagaacatatctgtaaatactcgactctgagcagtgtgacatatgcagtgatagaaatattttatgtaaaaattggtgtcttgattaggagatggttattaatatcagattattccccgcatccttttattttaagaaatttcaatttatcgagaaaatgaaagaatagcataatgtgtaatcttcacctagattcaccaattgttaacaatcaccacaaacatatgcataatatgtgtatatacacacacatatctatattttattttgatgacccagttgggataaattgcagacatcattataattcatccctaaatatgtcagtttatatctcctaagaataagagcattttcctacatttccacattactgctaacatactcaggaaatttcacattgataccattattttttaatagttgatatccaaatgttctaaattatcctaataatctccctcttcccttttctgttttttgaatctaggagccaatgctttaagttaccctgtcttcttactttcctttaacatgataaaaatagattaatctgccatgaaaaagtgaaaataccaaaccttggtgtgtgatgggaaatgaactcatgaaacactactggacttatgtatcagcacaacaccttagtatagatttatctgcgcctgtgtcctgggccatattttataatttgattaatattgtcctttgggaatccctgattcaataggattagtatccttatgaaaagagactcaacagagcttgctctcattctccctctgccatgtaaggacacagtgagaggacagctgtctacaagccaagagaagaaacctgaatgaaacctatcttggtggtacttgatcttagactttccaatctccagaactgtgagaaataagtttcttttgtttgtttaatctaacccagactatggtattttattaaggcagcccaaacagactaagaccagtcatttgtgtggatgattgatgtggcatgtggttgatgttttaggaaagggtgatattcaaggacgtggctgttgtcctcaccaaggaagagctggcactattggataaagcccagataaacctgtaccaagatgtgatgttggaaaacttcaggaacctcatgtcagtgagtgagtaactgagcatcagaccactggacctgtttcctcaaatcatcatttcaagccagatagaatattccagttagaccacaaagagaaactttgaccactggagagaaaaatcctaagagctgcatgcacaagttaggaccctgcagttaatgagcttttacagatcattgtgaggatgtggctccttgtgatgggtttgtgagggagctctccccaaatcttccacccctggcctgtgggcattcattgcaggaagtaagcccttcctcccctactcacatatttaggctctcattctttcctcatatttctcagaatgagactgataaaattcacacaccaccaaggaccttgatctatttgttgcttctggagaaaagtcaatgtttatccaatgttctggataaaccagtgttaatggaatcatgggagaactttgattttgttggaagttacaacagccaacacttatgggtatatagtaagtgtaatctaagtgttggcttatttgattactttttgataaatatccaacctcattttcatttctcaaagtttcatgtacagttaggtattacctaagtttagtttataagatagtgatatggtttggctgtgtccctaccaaagtctcatcttgaactgtagttcccataattcccataggttgtgggaggggcctggtaggaggtaactgaatcatggaggggggtctttctcgtgctgttctcatgatagtgaataagtctcatgagatctgatggttttataaatgggtgttctgcacaagatttctctttgcctgccaccatgtaaaacgtccctttgctcttcctttgccttccaccatgattgtgaggcctccccagccatatggaactgtaagtcaattaagcctctttcatttataaattacccaatctcaggtatgtctttattagcaacgtgagaacagactaatacagatagttgatgttattatcccccttttatggatgtattactctgttttcacactgctgataaagacatatccaagactgggcaatttacaaaatatgaaggtttaacggacttacagttccacgtggctggagatgactcacaatgatagcggaggtgaaaggcacgtctcacatggtggcagacaagagaagagagcttgtgcagggaaactcccctttctaaaaccatcagatctcatgagactcattcactgtcatgagaacaacacaggaaagacccacccccataattcagtcacttcccactgggttccacccatgacacatgggaattgtgggagttacaattcaagatgagatttgggtggagacacagccaaaccatatcatccgccccagaccctcccaaatctcatgccctcacatttcaaaaccaatcatgcctcccaacagtcccccaaagttttaactcagttcagcattaactcaaaagtccacagtccagtgtctcaactgagacaagccaagtctcttccacctatgaacctgtaaaatcaaaagcaaggtagttacttcctagctacagtgcaggtacaggcattgtgtaaatacagctgttccaaatgggagaaattggccaaaacaaatgggctacaggccccatgcaagtctgaaatccagcagggcagtcaaatcttaaagctcaaaaatgatctcctttgactccatgtcttgcatcctgatcacgctgatgttgggtttccatggtcttgggcggctccgcccctgtggctctgcagagtataacctcccttctggctgctttcatgggctgctgttgagtgtctgtggcttttccaggcacatggtgcaagctgtcggtggatctagcattctggggtctgaaggacagtggccctcttctcacagctccactaggcagtgccctggtaggcactgtgtgtgggggctctgacatgtgggaattatgagacacaacatataggaattatgggagttacaattcgagaagagatttgggtagggacacagccaagccatatcaatggatgaaacaactgagtcacagaattaataacttgcccacaatcacacagcttataagaagaactaggatttgaaccctcctaatctggtcctaggtcctgtgattttaataaataacctcatgaaaccaaagcgtaaactgtagacacaggaccttttgcataaatctgcatatctctgcagttgtttctcaaactgcaggataaaaccctcttggtgagtcctgaaatcaaattactgtgtcataactagcaatttttaaaaagcaaaatagattaatagaacagaaaacaaaagaatttatcaaagtacattgcacacagtatgtaactatcagctgagcaagttttagtgagcagtctgtgttgatgtttgtgcctattcctactgagtcacaatgctgattttactgtgggttacaatcaaaacaattgggaaaccactgcttaaaccctattcagggcagctcgtggtctccctttccctgatactatcttataaactaaagtcactttcaataaaacaacccagaaaggaccttgaaccagaagcagtatccagtgggacttgaccatgatattcatgccattttgaaacccatcttaggatcccaagaatatgatcgtcctcttctgcctcagccccctgtttgttatataccacagtcttgcttccctgggtgccaggccattgacagtgccacagtatctgttccccattttcatagtcatggctgtttgagattctgcaacaacttaaaagggcagaacttaaggaaatggattgtaggatctgagtggtctctatcttttcatgaagacaaagaaccttggggaaaataaaaaggatgtctcttaaagcttgtctcagaggtttacatacgcatccccgcacaacgccaggaccatatttcacaatgtttaccccatttcaatccccattgcctttttatccccatcccctttaggctcaccatgtacagttgtgcaggttgtacacaaacatacatgatagtcctccatatgacagtgatgtgaaggaagggaagccatcaggagataggacttgttgcttgtttctgaaacctcttgtgaccctttgtgtcccttactctgcccaacatataaaaaacactccatcaatatgtattatttatatacacacacacactacataaaatgggagcctttcccataccttttgtagcaagattattaaaggctttttatcgactactcttatagcagggaggtgaatttcttccttcataaatttttcctaagatttccttttttttcttttttgcagagtaggggtggaaaggtcttgctctgtcacccaggctggaatgcagtggcacaatcttggctcactgcaacctctgcctcccaggattaagcaatcctccaacctcagatttccaagtggctgggatcataggcaaaactgagccaatttttaatttttttgtagagatgggatctcatcatattgcccagcctggtcttgatctcctgggcttgagtgatcctcccacctcagcctctcaaagtgttgctattacaggcatgagccactgcacctggccaagatttcttttaatttccctacaacacttgatttccaattggcagctcacaggttagaattaccgtggctctaattgtttcatatgtcaatagaagccagggacaacttcccaccccatcatatttcgttttctcaaaacctctggacagatgattgacttggtctcttagccacattctctttcttctcataagagatgggattaaaaacaacattttgaatcttcaggaaaaggggttgaattaccttttacaagaagtgcttcattgctggcagatttcgaaacaaaggatccaggatttaactgggagtcaggattatatcatgaaccttcaagaagagtgttccccacatttaaaaatgtttccctctgtgaagagtgagcaggcaagtctcttcagatttctgaaaatgaaaactatgtagcaaatgtcattatcaaaaatcaggatatcacagcatggcaaagcctgacacaggttcttaccccagaatcgtggaggaaagccaacataatgaccgagccccagaactctcagggaagatataagggaatttacatggaagagaaattgtacagacgtgctcagcatgatgacagcctcaactggacctcacatgatcatcatgagtcccaagaatgtaaaggagaggaccctggtagacatcccaactgcaggaaaaactttggtatgaaatcaacagttgaacaacataatgcagtccatgtattaccacagcctttcacatgtaataactgtggggtgccctttgcagatgatacagatcctcatgtccatcacagcactcacctaggagaaaaatcttataaatgtgaccagtatggaaagaactttagtcagagccaagatcttatcgttcattgtaaaactcactctggcgagactccctatgaattccacgaatggcctatgggctgcaaacagagctcagaccttcccagatatcagaaagtcccttcaggaaacaaaccctacaaatgtaaagaatgtggcaagggcttcaggtgcaactccttcctttataaccatcatggagtccacacaagggagatgccctacaaatgtgatgcatgtgggaaagggtttggatttaggtcacttctttgtattcatcagggagtacacacagggaaaagccctataaaagtgaagagtgtgggaagggctttgatcagagctccaaccttcttgtccatcagagagtccacgctggagagaagccctacaaatgcagtgagtgtggcaagtgctttagttcaagctccgttcttcaagtccactggaggtttcacacaggggagaaaccttataggtgtgatgagtgtggaaagggcttcagccaaagtacacaccttcacattcaccagagagtccacacaggggagaaaccatacaaatgcaatgtgtgtggaaaggattttgtgtatagctctgttcttcacactcatctgagttcacactcgagaaaaaccatataaatgcaaagtgtgtggaaagtgctttagttacagttcatattttcacttacatcaaagagatcacaccagagagaaaccatataaatgtgatgagtgtggtaaagacttcagtcggaattcagatcttcgtgttcacctcagagtccacacaggagagaggccctataagtgtaaggcatgtggtaagggcttcagtcgtaattcatacctccttgcccatcagagagtgcatatagatgagacacagtacacacattgtgagcgtggcaaggaccttctgactcatcaaagactacataagcagagagaaacattataaaggtagtaagtcagggttcaattaggaaaacagaagccacactgtattccagatgatagaggctaactcagcctttgggagggctgggggagcaaaagacagggacgctgccatcgatgaggtcagcatgacaggctgggggttcgcgctggcacaggcgccggcagccacatcggcaggcaggagggtcccgctgcacagctgaggggtgatgattgcctgggtggtgatgtcggccattagacgcgcctcttctgccggcaagtgtgtggcagtatgaagtagaaggacaagcctgtatttgaggctggaatgcggaaggggctcttctgcggctaggtgtgggaccctgagcaggaatgtggagaaatgggcaggtaaatgcatcacgttggccaggagatttgcaaggacttacagctgaatgatgataatggggagtgactgtgaggccctgggagtctctgagtgtaaaggaagataggtgtggggcccccagggagtatgtgggagccattgctgtgtaggtggaggtagttggggaataatctggtgagctctgtgaatttctagggttctcctgaatgctgaggggtgactcttgcagaaaactgaggatgcttggagaatagctgggagacacagatgaggccctaaggaatggtggtatagaggtgacagagataagggaggagcacagtgaggtctatgagtttctgggtgactcctgtgtgttcagggctgacccaaggagaaatctggggatggttggagaggagctgggagacacaggagagtccctgagggttgcaggtgaagagatgggagacgtgatagaagagggccctgagatttttgtctataggtgatacttgggtttgggaagctgaatgttgcagtaagctggggattgagagaatctgggagacacaggagagtacctgagggcctggagtaaagagttgggagacatggggccagagccctgtgaggtccctgagtttctgcttgttacatgggtgtcagggcctgactgttacagaaatctaggaatgattggagagtaattgggagacatgagactccctgagggctggtggtgaagagatgggagacataggggaggatcccgtgaggtctatgagtgtctctgtaattcctgggtgtggcaggcagactgtcactgaatatgaagaatgttcatggcttatatattttttatttttactttattttctaggtctcatcatagctcatatataacactcaaaacatcattaaaccatctaatctaatattcgaccatatcatttctttctttacacgacttgtgagataagtaagatatcagttaaaattttcatttcagcatctgtttttctcatatcccctttgtgcttcttaaagatggttaaaataggacagacagacttggaactttgttcaactgtcttaggaaaagaccattgcaggggcacagtctttcaaccccactggccatgtaagactaggcctggagcctggaacacatccttcccaagagatactgaacctctttcagactcattgagggttcttcaaagtgtgggtcagtggtccccaagggatgcccgcagctttcagtatttcacactccatgaaaacatcagcaactgttttcccagacctgacactgccaggtgtgcaacaatctctggattaatcctcatagagatggctccacttagggtcatctcatagggatagaattttgctaaggataaccccatcagttaccctttaagttttctttcctatcccaagggtattaacctctattatctggtctctcagttcaactttcagcttattacctttctgggatcagaggcttcaatatatggtcatccacaggattcaaattcatgattcaagggaaaggtcagaaagacatgttaatcaaatcttaaatatcaaagagtaactaaaactttgcctcatgaaagcatttttgcaagcataatttagacggtcagcactgagccagggaagcacccttctattcagaggactctcacatcagggaacatatcccagaggaaagagacaatgctacatgaggggaagaactaaaacatgaaaatagagttccttaatattgctttgcatatatgaaaataagcccacttgccctctatacttcccacgcattctcagttcttcatatgaaaccatttctggccaaaatttctagttacctatttccaggaatccattttattttcaatgaggaatgttcctaggaatctatgtcctaagtagtaatctgctcatgctattccaaacataaacctcattatcctgagggatctttgctatttggttgcttagtctttcctaaatagtcaaagaaggaaatctttgtatttcatttttggctttgaataatttttactcattatatcatttatcatagcataacagcgtacattccaaaaaggaaggcccaacataaactgagaaattgaatagatacatccataatccctttctattctaatccatacacaaatattttatcataatggttttagaagtgaatattatttctatattcttttcccacacttttcactatatatcatagacactttcctaaaatttataaaatcttcacatgtaacaacagcaagtgctgtaaggaacagattacaagctatctaattggaagatcatgtagtaaaatgatgcactaaaatatggttttccagcctaagttctaaacactacagcaacctttaaattttctcaataagcccactagtgttagcattccatttactctttatggaaaaagaggtctaacactggcagttggctttggcatatgattttctctgattcaggtctgagtgctttctgcaaggaaaagtgccagtatttattattttcataggaatatgtcataagaatcaagtttaacattgtatatggaattgccaggttgaaaagtcgttcatagactttccccctttcttttccagaacaaatttgagacacacaattaacagagggctggaagttttcccacatatattgtttttatagtagttcttccaactacatgtactaccttaaaataaattttttaaaagaatgaaataaaaaggaagaaatcccagctgatttacaaactagttacattcatagagtttctcttcagtatgagttgcctgatgcctaataagtttatagctattaatgaaagcttttccacactgaatacatgtaaagggtttctctccagtatgagttctttgatgcacaataagtcgagcactcaagctaaatgtttttccacactgattacattcaaatggtttctctccagtatgagttctctgatgttgagtaaggcatgaactctgtctgaaggacttcccacattgactgcattcatagggcttttctccagtatgagttctctgatgtacaacaagaacataactctggctgaaggatttcccacactgattacattcatacggtttttccccagtgtgaattctctgatgcataacaaggtgagaactgcggttaaaagattttccacattcactacattcatacggtttctctccagtgtgagttctttgatgtgcaacaagctgagagctccagctgaaggatttcccacactgattacattcaaagggtttttctcctgtgtgagttctctgatgagcaacaagtttataactttgactaaaggatttcccacactgattgcattcatagggtttttccccagtatgaattctttgatgtgcaataagtttatagctctggataaatgatttcccacattgattacattcatagggcttctctccggtatgtgttctttgatgtgcaataagtttatagctctgcctgaatgactttccacactgattgcattcataaggcttctccccagtatgagttctttgatgcacaacaaggacataactctggctaaaggatttcccacattgattacacctgtaaggtttctctccagtatgagttctctgatgggaaacaaggtgcgagctccggctgaaggattttccacattcactacattcataaggtttctcccctgtgtgagttctctgatgtgcaacaagatgcgagctccagctgaaggatttcccacactgattacattcaaaaggtttctcttcagaattatttctcatgttttgagtaagggaggaactatgagaggtttcactacatttatattgactctcttcaaaaggaattctctgttgttcattatgggatattttggggttcaaaacctgcccacattctttaaaatcaaaggtttttcctcctccatgaattttttcatgtatatgtaggggtgtaccatggcaaaaagattgaatacggtcactaaatccataggatttatcttttgtttgagttcttgtaaactgaataaggtgaatgctctgagggggttttccacattcattattttcatatagtgtctcattctcattaatcttctgatgactgtttacagcagcattaagatgccattttttagcatgtgatacatgtttatgaaaatggtttcttatgggtataactggggatgaaaatagactggaattcagaccactcttctccccagtttcatcacttttgcagactctctcatgaataactgctttcctttgagtgaatgccacttcctgcaaaagtatctcttgtttttcctgttgcttctccaactggtctttacaatcatccacttcttcacatgaagataaccaaggatcatcccttgtaaacctttctatcttcactccattagctggttcttcatcaaaaatcctctgctttgaagttgaatctttttttccaactgcagttgccaagtctgaaagaaagcaatataagacatcttagtcaaaaaatattagagatggaaaaatggaataaagctaacaagaaagtatgaaaaatatatatgaatttgttttcaaatactgaccgataacctaggttgaaaaagcaaaagggtgagataaagtattaagtacagaactaccacagcccaatattacaacagagcattaaaatggaactattgtaatcttggtttaatcttagtctgaataaataagactctggatgtcaaatacctgcatattccaaaataagatcatctacatagaacctacagaattgcaacccaattttgcaatatgtatagagagtcttttccactctttagtgctacacagatgttcactaagagattagtgtctacatatccaggaatttctgaaggcataaaacttgctaaatactctactctgtgtcagtgaggcatgaggaaactatgtttgtgaacaaaagaaaaggaatggggcattattatccagttccctaactaccttaggaaccaataaagccccacaaatttctgtgattccaactgagagagactagaagtttgctcctagtagcctgggtggctactaggtcaagcaatagagagtatatatggaaaaagtagtcatgtatacagtccaccaggaggtgggaaatgaagaaaaaatgtggcatcttctatgcggattttttcaaatggaccttctacacctgtaatgacccctatgtgtctggttctcacttgaacacatgtattggaaaattctttttatattctttcccttgctccaactaggagattgtatctgcttcaaaaagctgacaaggaaagatacaggaatttgagttttcaaagctggggacaaaagaaaattactgcagaatctggtcctggcctttggtctttaggaacatgaagactgaaaatctcaagcccaagaatctgcactatttctaccctacaaactaaaattaatcttcactggggaataaagagcacaaacacaatctagatgcagccaaaatcattctggctgctgaatttcacagttcttaatcgatcagaatgtgaaatcatttcagtagatggatcttcattaaagaggagtgtattcttaccccaagagactaggtccctgtggttctccaggatcacatctctgtccagggtcctctgagcagggttgcaagtaccctgttcctcccgtgtgaagtccacagtcacaattttgaagttcactccttcctaaaaaaggacacacattcctgctcagctgggcatcatttccttccaaagttcatggaggaggaaaagtctgacagatggaaaaaggaaaattggtgacctgggagttgtccttaaattgtcagtgcccaaaagattccagtcaagatgtacaggtgccttctgggtgagctctttgggttttggatgctggacctgtttttacaactccaaagaggaataccagataagaactgatataaactattttattttgtctgccttaaaaaggatgcttattctgacttttgcactggtgaatatagaattcccacttaggaattccctctaaattcccaagaaattaatgaaacaggggtggttgatttttttctgtcaaaggccagatagtaaatatttcacactttgccagccatacagtctctatcacactactcaactctgctgctatagcaagaaattagccacagaaaatatataaacaaatgggtgtggctacattacaatagatctttatttacaaaaacagccacaggctgtactttgctaatgcatgagacagaaaatgaaatgtggacctcgatgaaaagcagtatgtataggtgaagaacactggatgtagaagatacaaagacttggctttctcacctataaagggcatatatctgcttaagaaatacatctaatctgacaatctgtcctttttttttcttttgagacaagacctcactctgttgcccaggctggagtacagtggcacaatcatggctcactgcagcctccatcttctgggctcaagtgatcctcccacctagtctcccaagtagctgggactacaggtgtgcatcaccgtgcttggctaatttttaaaattttgtagagacagaccctcaatatattgcttaggctggtctcagactcctgtgttcaaggaatcttcccatctcagactcccacagtgctggaattacagggatgagccaccacacctgacccaattgtctttccctggcgagtttattccatttctatttattaggcctaataatacctaaatcattgggttgaatgaataattacgatgatctatgaaaagccactagcagagtttactgatgaaacaacgaaggccagcaattacaggctgagtatcccatagctaaaatacttaggactggaagaattttggatttcagattttgaaatatttgcatttacatgagatgccttgaagatgggatccaagtctaaacacaaattcatttatgtttcatatacaccttaaacatatagcctaatggtaattttatgcaatttttaaaaaaattttgtgtatgaaacagttttgactgttttgactatgagtggtcgcatgaggtcaagtgtagaattttccacttgtggcattatgctggggctccaaaaccttccaattttggacaatttcagatttttggattaggggtgcttagcctgtactgttatgattagtaggtctcaggatcctcaaagattaactgagagccaaagtgacctttattctgaactctcagtcttcaaataacagttctgtttctatccatatccagctgcatggcagagccttttaggagacgtttgctgttattactgccatataaatggggtctcttgggctgcctcctctaagcaggaaagggcctgttcttaagataactgggcaggaattttaatccaaaagagaagtgctaagggtgatctgtccttacccaggcacagcaaaggcaaggggaagtcgaatgcctcttgccactaaaggctctttaaatagaccaggcattcttgagctgcagttcatgaataggatacagggtcctgaatgccatgaaagcacatgcaaaatactgctgtatatgcctctaagtttgagcctaaaaatttcactgaaacctcaaatgttttcatgattagcccaacgtgaaattcaaaaaataactcgccaactgctgcctgtatttaacattaatctttaaggtattgtctttcaatctgtaatgcatgcttctttttaataaacactccccctttctgtgtaatataggtctctttagtataaagcttgttcaaatgtcaaacagataatactaaactagattagcacccccactccactcccaactatatattctcaaagttccatggacttctataatcacactttcttatttgcagaatggtcatctctgtcactaggccatgatccatgaaggcagggacaagtatttacagtttgcaaatgtaactccaatgcttagcatagtgtttatatatagtagatattacatttatatttcacaaattatttcagtaagtgaatgaacactatcaataaaccttataagatatcaaaataaccctcacccaaattgatttaagtcatcccccctcacctgaatctcacaagctgtaccacatacccatttgaaaaggcccctcaatgtgcagatactagcttttctggacttctatcccacttattctattcttctcacttgtcccaaattcctcatgcctgaaaactccttcccaaaatcttcaactgcccttgaaactcatcttttgtaacaataaaataggatgggtagggcggctcatgcctataatcccagcactttgggagactgaggtgggtggatcatttcagcccaggaattcaagaccagcctgggcaacatggtgaaaccctgtctctactaaaaacacaaaaaattagccaggtgtgctggtgcatgcctatagtcccagctactcaggaggctgaggtttggagaatcacctgagcctcggaattcaaggctgcagtgagccatgatcacaccattgcagtccagcctgggtaactggagtgagaccctgtctcaaaatcataataacaataaaatattgcagtttcagtatccttcaccaaacattccctatacatccctgtgttaatggagacttatacttcctgctgatgacttccctcctcctcagtcctcagaggctaagaatgctcatactctcccatcctagatctcagcatcaaagaaggagtgcatgtcctcccagttactctgaaactcatgccatttacctcacttcttggagctctgtcctacccacctcctgaacaccacccccaccccattcactgaagattcatacttgggatttatcctctaatataagaacttgtagtgtcttatctcatattgtctatagcatccacttgtatagtcagctgatgagaatataaaaataactgactttaatgaagcacttatgagtttgcatgaagcaccaccatggtgccaggcattgtgctaacatgtcatatggattattcatttaattctcaaagggctcctgtgagaaaacactattagcagtattatttttttcttatgaagaccaagggagtcagagaaattaagacatatgcctaaggttagtagtagagggataaaacctcaagcttgcacattgatgactgtgttctcagtcatcagttcatatggctaacccaagtctcatattctgaagctgctcttcatcagctcattcttcgggggacaccccagaccttgaaattgtcataaaacactccaccttttgaatcacaaatacaaaactgcccacgtttcactacaatgtcagattgctccactgtattggctcagttttttccctttactcttgttccttgaaagtttaaggccattatgctaccgaaatgtctactattaccactaccagcctatattctttttcatttctacttagtgggctctttatcacttccatattaattactcaatttaaggttcatggatcattctttttaatctttctacttgacgtatttttaaattctctttcaagtattcccttgacctttggagtgtccactccataggaagtggacctggcaaattacaaaaactaaatgaatctgaatgtcaatctgctatctgtggaaagtgggctacaaattgccactgcagggaaaaatccacaaaagcagcaggatagagtattataaattaatggccactatctctgaatgaaactttcagattgaccagcaatcctattacatttactggagcagcctgtttcctctcataatccaaaattgctattttaagccttctctacccttgtcatacatctctccattccaattcccaccatcatgctcatctgatttttcgcagtgaaagatcaagctttcaaataattccctcaacctcactgttcctatataaatccttctcctcatatagagctaatttattcaagatgttctgaattaatttctctggtgctaaccaaggactgtgctttatagtttctctcttgttgcctgatgaataactttttttcctctactaactccttcctgtaatcatttaaactgaattgaatattttcaatccctttaaaaaaaaccctcaatctcaaaagtccttgaagttttcactttcttctaccttccacacaataaccaaacttcttgaaaaagttgtccacttttgtctccatttcctcactttctttctttctttttttttttttttttgagatggagtctcactctgtcgcccaggctgaagtgcagtggcgcaatctcggctcactgcaagctctgcctcccaggttcacaccattctcctgcctcagcctcccgagtagctgagactacaggcacccgccaccaca[131 bp omitted]cctatttcctcactttctactcacttcccagccatgcacatttctcagtgtaaagacagaggccttgcccaacctacctgagatgggatggtcagagacccagtgtcttctccctcgactttgatgataatctcttgaggaaggaaagaatcctgaaaaggcaaaacagatgagaaaaaggaaaataatcagggagctaagtggcagctcaaatctcctccggtcagtgggctaagatttgacataccacctattttaacgcatccctcccaccatatttctcctccctcctcctagtggtaagctccgctaaccatgtggagagagagaggagatacatggaggagcaccaaggcccacagatacctggacatgaggtctttttgggtcttctgggccagcccattgcagctaaatgcagctgactgagtgatccaagacactaaggagcactaagacgctaagaactgtccagcgggacctgccaaaattcctgggtcacaaaattataagcaaataaaatggaatacagcataaccaatgccagaatcataaagaaaaagatcaacaaattaatttcataagatgtttagcaggccgggtgcggtggcttacacctgtaatcccaatactttggaaggctgaggcaggcagttcacttgaggtcaggagtttgagaccagcctggccaacatggtgaaaccccgtctctactaaatatacaaaaactggccgggcatggtgacacgcacctgtagtcccagctacttgggaggctgaggcaggagaatcacttgaacacaggaggtggaggttgcagtgatccaagatcatgccactgtactccagcctaggcaacagagcaagactccatctcaaaaaaaaaaaaaaaaaaaaaaaagtctagcaaaaggtgccacatgatcaataagaatctatactattaagacttcttccaaatcagtaaaaggtagcctcaactgacaaagaaaaatgcacatgcaactatgaagaaactgctgtgaatatacaaacagatgctcgcctctttacatcaaaatcaaacatctgtttctttatctgtatatattagagaccataagttcacatggatacctccaattacaattcaataacacattttattctgtctagcttttctcctttctttatgtatactttctttctctggctcccattttcctctttatatttacttatttgctcaagccctgtacataaccaacatcctgaccacgtcgggtgtttttgtgacagtcacagtcattagtctgttgctaatgactccagctctggcagcccactggccaagagcttcatatattcttagaagaagtataaattgatacaaccctcctgtattggctatatattaaatatctgtatttacaaatactgctttattttgaaatccttaaagattcacaagaagtagcaaaaatagagccacactcagctttccctggtaatatcatatataatgacagtacattgtcaaaaccaggaaattgaaattttggtacaatattattaattcatgtacagagtttattccatttttatgtacattcttttatttttgtttttttaaaggcaatatttttaaaagtgtaatgtaacatccattaagtctacttgtaagtacttatccttaggaaataacataaagtacatcaggatgcatatacaagaaacctcattagcaagttacattatcatagcaagatgggaagggagactaaatgtccactaggaagtgcctggttaaataaattatgctttattcagatgactgaatattatttagcagccaagagaagaaataaatttgcatgtaccgatacatataaataatagaaagatgtctataatatattgctgagtgaaaaaatgaagaacattatacagaagatgaatagatttctataaaatataaatatgcacggaaaaatctggaaagatgttctcaaaagcattaaaaggagttattctttgaaggggtagaactgaggagcaggttcactgtctctcttttaatgctgcatccatgtttttcaaaaccacttattttaattaaatatttggaaaccaggaaaggtgcttccctctttaaaaatcaccttgaaacaacgcaattcctttgtagtgtcctcaggttttttcctacaggatacaataattcagtctgttaaatgatagcccattcaaggatactttgctcctcctcaaatcaaacactgaaaagcaactactgctaatttttgataactcatttctttagaagccattggatcaaaaactaaaagaaaataaaagtggccaggtgcagcagttcatacctgtaatcacagtgctttgggaggctgaggtggaaggatcacttgagcccaggagttcgagcccagcctcagcaacacagtgaggctcccctgtctatacaaaatatataaaataggccgggcatggtggctcacacctgtaattctagcactttgggaggccgaggtgggcagattgcctgaactcaggagttcgagaccagcctggtcaacatggcgaaaccccatctctactaaaaatacaaaaaaatacaaattagctaggtgtggtatacctgtagtcccagctacttgggaggctaaggcatgagaatcacctgaaccggaagttggagtttgcagcaagctgagaccatgccacttcactccagcctgggcaagagagtgagactccatctcaaaaaataataaataaataaataaataaataagccaggcacggtggtatgtgcctacagtcccagctacttgggaggcaaagatgggaggatcacttgatgtggagaggtcaaggtataagtgtgtcaattttttctccttatctatctagaaaatattttactattacagtaggaatggttattaaaaatggctagcattaatgtatttaaaggtaggaaaggattctccaaacctaaaaacaccactgtatatttactgggtaggttgtgaggttcacaataagtatcaaagagccagagctgctgcaatgtaaagaaggcccaatgtgaaagccaagaggttgtgttgcttgcattactaccacacatactacaacagttaaactgcctttttattttttgtagaagacagggtctcgtcatgttgcccagactggtctcaaactgctggtctcagcgccatgacagttttgtcaggaagttaccctctatggtctaaaaaggagaggaaccctcagttctgggaattgcccaccccagtcctggaaaactcatgaataatccaccccttgtttagcagaaaatcaagaaataaccataaaaatgggcaaccagaagcccctggggctgctctgcttatggagtagccattccttattcttttacttttttgtttgtttgtttgttttggttttggttttgagacagagtctcgcgctgtccccaggctggagtgcagtggcatgatctcaactcactgcaacctccacctccggggttcaagtgactctcctgcctcagcctcctaagtagctgggactacaggcgcacatcaccacgcccagctaatttttgtattttttgtagagatggggtttcacc[139 bp omitted]ccctctccctctccctctccccacggtctccctctccctctctttccacggtctccctctccttctctttccacggtctccctctccctctctttccacggtctccctctccttctctttccacggtctccctctccctctctttccacggtctccctctccctctccctctctttccacggtctccctctccctctctttccacggtctccctctccctctctttccacggtctccctctgatgccgagccgaagctggactgtactgctgccatctcggctcactgcaacctccctgcctgattctcctgcctcagcctgccgagtgcccgcgattgcaggcgtgcgccgccacgcctgactggttttcgtatttttttggtggagacggggtttcgctgtgttggccgggctggtctccagctcctaacctgagtgatccgccagcctcggcctcccaaggtgctgggattgcagacggagtctcgttcactcagtgctcaatggtgcccaggctggagtgcagtggcgtgatctcggctcgctacaacctccacctcccagctgcctgccttggcctcccaaagtgccaagattgcagcctctgcccagctgccaccccgtctgggaagtgaggagcgtctctgcctggctgcccattgtctgggatgtgaggagcccctctgcctggctgcccagtctggaaagtgaggagcgtctctgcccggcggccatcccatctaggaagtgaggagcacctctgcccggccgcaaccccgtctgggaggtgaggagcatctctgcccggtcgccccatctgagaagtgaggagaccctctgcctggcaaccgccccgtctgagaagtgaggagcccctccgcccggcagccgccccgtctgagaagtgaggagcccctccgcccggcagccaccctgtctgggaagtgagtagcgtctccgcccggcagccaccccgtccgggagggaggtgggggtcagcccccgcccggccagccgccccgtccgggagggaggtgggggggccagcctcccgcccggccagccgccccgtccgggagggaggtgggggggccagccccccgccgggccagccgccccgtctgggaggtgaggggcgcctctgcccggccaccaccccgtctgggaggtgtacccaacagctcattgagaacgggccatgatgacaatggcggttttgtggaatagaaaagggggaaaggtggggaaaagattgagaaatcggatggttgctgtgtctgtgtagaaagaagtagacatgggagacttttcattttgttctgtactaagaaaaattcttctgccttgggatcctgttgatctatgatcttacccccaaccctgtgctctctgaaacatgtgctgtgtccactcagggttaaatggattaagggcggtgcaagatgtgctttgttaaacagatgcttgaaggcagcatgctcgttaagagtcgtcaccactccctaatctcaagtacccagggacacaaacgctgtggaaggccgcagggtcctctgcctaggaaaaccagagacctttgttcacttgtttatctgctgaccttccctccactattgtcctatgaccctgccaaatccccctctgcgagaaacacccaagaatgatcaataaaaaaaaaagaaaaaaagaaaaaaaaaagaaaaatttagaaatgggaaaaaataaataaataaataaataaacttgaccgaaagaaaagaaagaaaagaagagaagagatgagaagagaagaacaagaaagaaagagagagaaagagagagagagagaaagaaagagagaaaagaaaaagaaagaaagagagagagaaagacaggaaagaaagagggaaaagaaagaaagaaaagaaagaaagaaagaaagaaaaagcaagaaagaaagaaaagaaaagaaagaaaaagacaggaaagaaagagggaagggaagggaaagagggaaaggaagggaaagaaagagggaagggaagggaaagagcgaaaggaagggaaagaaagagggaagggaagggaagggaaagaaagggaaaaaggaaataggagaagggagggagggagggagggagggagggaggatggaaggaaaaagagaaaacaaagagaaaagacaatacaaaaaaaactactgttcttaagcagtcctcttgcctcagcctcccaaagtgggattacaggcgtgagtcaccacaactggcctaaactgccttgaaattgctgcatgaacattacaaaatagcccaaaatgccagaaaacaaaaataaaactcacaatgccaaaaaatagccacaaccaaactacagatggtacaagggagccacaagttttgaccccaaactgttaatggattcaatcttatctggcctgaaagaaaaattacattcctgatatacacccgtgacaaatacatcttttcttaaaaaaatgcctgggaaatgagaaaagttactcaagaaaggaaaatttgtaaatgctaacctgtattttaagttattacaaactccttcagataatatcacactctgttaattaaaaaaaaaaagctaatatcagttaagaaataataccaagaattggacaacttaatgtttttctcagcaggtacttggcagaaacaaaattccaaaatgtcactatctgccataactgctaaaactattatacttgcagaatatggttgcacctcctcttgaatgcaaactgtttttagcacctttttgtttaaaagttttcacaagaaaacaaaagaaagctcatctttcctcaaggtagactctggatgaaatgtccttccttgccctgaccccagcagtcaactctatcactttaccctgctttcatatcttcacatcacatatattcttctacctttggctttttatttaactcttccactagagtgagtttcataagagctgagatcttgtctgtcctgtttaccgtgactccaccatgcttagatcactactgacacatagcaggctcttcataaatgtatgctgactataaacagccactaggagaagggacatggaatgtgctacctgtaactttgcatttgtccctggggtccctggaggcactaaagcaaagctgagctcaagcccctcccttggttagaggaaacctttgttgggtgccttttctttgcagaaaattcaaagtgtcagtatccagaacctgctcccaacttactcttacaaactaaatgctcagaaacaagcttgcaacaaatgcatgtgagcccgtgcatgcatgcacacccacacaccctgaatttttccccaggttctactcactttggattactgaccattttaggaatatctcctgaatttacatcttagctccctcagtttccttcagataatgtcaatgtaatctatcatttgcctagtatttttagtaatacatagagtacttcaacacagaatttccatctcacaaaatcatctaaactttttttttaagagctagggtctcattttgttgcctaagctggagtgcagtggcaccatcatagcctactatagtcttgaactcctgggctcaagctatcctactgtctcagcctcccaagaagctgggactacagaggcacgccaccacagctggctaatttttttgtttttattttttgtagaggtgggagtttcactatgttgctcaggctggtcttgaactcctggcctcaagtgatcctcccatgctggtcccccaaagtgctgggattacaggtgtgagccactttacctggcctaaacttttttttgaagaaaagagtaatatgtctattctatttcaccaatgcagaaattaatggtaataaggtttagtaagctcatttaagtccactgattgcctgacacaaactcttctgcttcccactgtcttaccaaagtctgtctaatcacccaaggcccagatcaaatgccacctcctccatgaagcgttcccagatagcagaaagcttcatctcttcttctctcaggacttcttagctttggtggccctttactataccagtaaaattattctcttcatattactaccatttctatatacctctcccctgggtcctgggttctatattagaaagcactgtgtattttttatctttgtattctcctcagtattgagtaggagcacaataaaagttctctgcatttgacaagactagagacacgtgcagagtttgggacataggaatagaattaaaaacttttactctactttctgtatgctctggagcatctttaaattaccctcttgttcaacagtcacctctctaggtcataaaggagcatttccctttttctttgcagactttacgaaatgggaacaggaattagactgttgacttgcacagagaaaagggttgtgggcaggagataataattgttccttctgtaatgtatgtgggaccccatgggaaccaaagcagggggaaagagacaagcagagctatcatggagtgacctgtccgcttcatagtaagacagtggtcaaatcagacctagggctagggctatttgctcacctataaatagagatgaccaaatattcctttcccaatctgaggtattcttggggcaataaaatgaagtttctaatcaaatcacagaaatattactggactcaattctcagagctttgctttgggggtctactggcaggaaaccctctatatctgtgagaacatttagaaaacacaggcgtcacacaggcagacttcttggtgtgtttccatctcttcctgccctgggagctggaaggtggagctcacatttcagctcaagggatatggcgtccacagggcccatgtgggaggccctgaggtttcttaatcaccaaatctagaaggcgtaaaaccaatattcacaaactacagcactggaaagaaggttcccttccctgattttctcagaaatcatcctgacaagaggatccctttagtcctcacgcacaagaaaattccctctcctgccccaccttatcatccatgaataattctcactgtcctgaaatacacagaatagaccatccacatagggccaccaacaacctgcacaacttcgaatgttgagaatgacagtggatgggtgagattctaccacctacttggcagcagttttggtctcagtccctgaaggcaggtagggctcagagttggctcaaggccttcgctggaccagctgctacttcctgtgtatgagccactaaaatctctaaggtgatgccccaatacccagatggtttcttcctagatcagctcactggactcgtggccttcgttcaaagcaaagactttggctcccttgatttttctctcccttccagggttctaatatccttcaggtccaaatcaagtacttgttcatcttctgataataattaaaattaactagaggacattcagagttgagaagtgtggtagccagactctgagatggctcccaaagacccttactacctagtattcatgcctttgtgtagtccttgaccaatggtaccaaggtgggtctgtgtgaccaacagaatatggaagaagtgatggtgtgtcacttctgaaatcagatgataaaagacattgtggcttcatcttgattgtgtgcaactaagtgctcttgctctctctctctctctcactgggatcacctgctctggcagaaatccactgctatgctgtgaacgccctggaaagaggcctctctggtgtacagcacctcttgccaacagccatctgagtgagtttgcaacaatatcctcccacctagtcaagccttcagaagtcagcagcccagacaacaacttgcctgcaacctcatcagggaccctgagcaccagaaacaaccagttaagctgacctggattcctgaccctcagaaattgtgtgacgaaataaacattggctattttaagctgcaaaattttggggtatgtaataacagataactaatacaacaaacaggatgtttttgctttccctatgtagccttggaaagtataagaagcgcgtttctggttgtgagaactaagtcgtgcagggcagtgctgtctgtctcatctttccccacagtgctttgcacagggccttacactggttaggcagtcaataaatatgtgacaaaagtcatataatgaacagacttctaattcagctcacaaaaaagaaaatggtaaaaggaccattaagagtcccagaaaacacctagtgcctcgcttaaattagaacaccaatgaccacatcaaaacacattctaccagccaggcactgcggctcaccccgtaatcccggcactttgggaggccaaggtgggaggatggcatgatcccaggagttcgagaccagcctgagcaacacagcgagaccctgtctctacaaaaagtaaaaaataaaaaaattagctgggcgtggtggtgtgcacctgtagtcccaaatactcaggaggttgaggtgggaggatcacttgagcgcagaaattccaggctgcagtgatctatgctggtgtgccatgtactccagactgggtgacagagtgagaccctgtctcttaaaaaacaacaaaataacaaaaccccacacattttacctgtagttttgataaagatataaatgtaaacttatatttgcttaactctttctaaaacaattgcacatgtatacatggaatcccatacaaaacatttatatcaatgctatttgtaacagcaaaaaaatgtaacactaaagagccattaacaataaacccataaaacctgtaacatatttagaaggtgaaatgtgggcactaggtatgcgtagtggtattaggatgtcactgctcccagccctccgcggacagacagggaatctgtgtgcacacatacgcacaccgatacaagcacacatctctatatatttctagattaatgtgtactgaaaaccatgagcccacaataaaacctccaattcccactgcacaccagagtccactcaaatgttctttcttgccgtatctgtacctccctgatttgatggcaaggcgcctggctccagtcccttatatatacacttacttatctgatctagccccctgtaggtagttcctctcccatttccacaatgacgccctctccctatggatgctttcccagactccctgggctctgccaccccacactcggccaccctctgcccaggggagctcctcaccctgcttaggctttgactccccgggctaggctgccccatctctcagactcactcctctgccacttggacttggacagcccacgtcaggccaccccactgtgtcagtaccctccacatgccgctgggctctgacacccctgcaggccaccctcacgcatgatgccctcaacatgctcatgctctgacatgccacaccaggctgcacctgacccccaacacaggtgcacatctcaccccactctggctccaacaccccatctaccatggacacctgctcactgcacttgggctccaactacccacaatgaagcaccccctctctggatgccttgctcacctgctctgaccccatcaccccacaccagatctccatatatggacactggcctcagccacttgggctctgacacccacattgggctgcaccacgtgcacaagcgacttcttcattccacttgggctctgactatgctgggatgtcatcctgtgcagatgcactcctcaccctgcttggtcactgacaccctgcacatggacactctcttcacagcaggcagtcctgacaactgtaggtgccccctaacactgccccacctcacggcttcaaggctgacttgttcaggaagagaaaggagaagctctaatttaacagttttaagaaattaagagttttcaaagaatatttgcggtgggaaatgttctaaattgttaacttgttttttagagacagagtctcactctgttgtccaggctgcagtgcagtgacacaatcatagcttactacatcctagacctcctgggctcaggcgatcctcccacctcacccactcaagtatctgggactataggtggacaccactatcctggctaatttttaaaattttttatagagacagggtctcactatgttgcccaggctggtcctgtactcctggcctcaagcaatcctcccacctcggcctcccaaagtactgggattataggtgtgaaccactgtgcttggccaattgtcaatatttttaccttaaagtgtactgtacaaaaatatgaaaatacaagccaggtgtggtagcttatatctgtaatcctagcactttgggaagttgaggtgggaggatggcttgaagccaggagttcgagaccagcctggaaaacatagtgagatatcgtttctacaaaaaatttttaaaatacacacacacaaaaaatataagccaggcttggtggtgcccacctgtagtcccacctattcaggcggctgaggcaggaggatggcttgagcccagaagtttgaggc[137 bp omitted]acagataatgtttgttaactgattgctatatttatagtcttctaacatattttctatatacccaaaaactatatctctttttaaaaagtgatgatttctaagtgcaatttacttaacataggtaataaataactttttctgtcattaaatttgcattatcatcagtttcaatggctacagtgtattctatttcatggtcttatcgtaattcattcagctatcctcttacattgcacatttagtatatttccaattgttcattctcaaagctgtgaattgctggccaaaagggaatcagcattttaagggcttttgattcaggatgccaaattccttccagaaagagttatctgggctaaaaaggtgaggcaactagcagggagattcataaaatatatagtaagtgttagaagcctgatggccatgagggcctcaaaccccctaaaaggctgcaaagagagtcagggaggagccacagcctcccaagctgagagggtcaggctgcagacagacccaagctctgggtctccactcacctgtgcacagaccttcgggggctctgggggcttctcatcctgctcttccatgctctcctccaggcacagcagggtgctgaggtcctgagctgcactgagagaagccccaagtacagcatgaagatgtaggtctgccggaaccgctgggccccccacccccattagcccctgctcccaggatgcaggatgcattcccatagcaaatgcacttctggaggttcctgccagcttcctgcccaaatacctgtgtatgtactgagagtccctcagtccctctcccaggtcaagtttctgcagctccaacctggttcctccaccatcttgggcccctggaccatctacctgtaagcccagcttgtgcccaacatggccttctgcccaccaccaaagtctgcagcaccagtccatccctctcctattcactgggccctgggatccccacaaatatcaggcatattgaggaccccctggtgttcaccccatcctacccctaccaacctcaatctacagccccaaaccagcacttcttcctagggccagaatcacactcactgcctaactgcatgaagctggtgacacagctccactgctcccaggaactgattcaacaactaagactgatcctaccgttccatcagccagacctgtccctccagcaactcagcacagagggccacccacatcctgctcaaatagccaagcatttatgcacagagctcagctatacccacatcctgttccctccacacttctggggtccactggctcctactcgaacagcaccagccagattcccaccctaacaccctcccaggccctgaatttgtagctctaaaccagtccctccaccaacttgggtatactcaggcctgaaactacaacaaggcctgcatagggctgggggcctccaacagacaccagcacaagccagacaaaagcagccctacccaggctctaaatacatgtctcagaagctcaggtgcctctgtaccaactaggtgttttgggatccaagactagagggcaaatcctaccctaggcaccccaccctctgcactccatctctcccacttactctctcccctgctcccaccatattctcacgcagcatagcgtaggttcacaatgcagctgtttcctgaaattgcacccaaactgtttcctccaccttactccacagccccctgcttgagccacacctgcccagattctgaccaaacatctttcgggggcacctgtggctcaggaagatcctgtctttccaccaaactgggcaccatcaggctgtgatcagggttccaatcacacaaagaccccagcaccctctgtctaaaactcatctccggcctcctgtttcccaaccaaacaccggtgtgtgtgcacaaggggtgcctgacacagtcccgcccctctgcagctgctcccccccacacacctgggcatcctcaggcagaatcagggtcctaggactgcccatgcctccccaatctgcccaaatgccagcacacgtgcagagtgttgctggagcagccccgtgcctcctaagaccagatccaaactggagcccccaggcctctattccacagccactgcacacgggccacccacctagactccctcctactgatacagccacagagcaggttcgtgctcacaatctgcatccaggacctggctcctctgcccgtctgggggcacaccatgctcctgagtcaacaatctacatccctcaccctgtgtctcaacctgcctgggacatctcaggtacccacagcctctgtgtaggttctggggtcaactgccccactatttgcccgcagccaggacactacaacaactaaacagtagcttgagcatacagctccataatcagccccaggacttgggcactcgccagcgtgggggttctcgagcctacgatacagcagctcaatgggaactgggccctttgtccttctcttgcccaatcatgacggcctgggtgttgtgcagtcagctcttcccgggaccaaatctgcagcacaggctctgtccctctactaacctgcacattctcacgcctgcaaatagcgtacccaagtaaaggtctcagcaacacctgcttcataacgatgctggcaacatactgcttcctccccagctaccaatttgatggcagctgttgcagctctgtccttcctggacttaaattctgtatctccaacccggagtctctgcccatcttgaatgctctagagctctgcactatcctacataggtccctactatcagttcaagtttctgttttccattcagacacccccaggacgtgcagggggccctctgcccagaacctgtttctaggccctgataccctccttcagcctgggagtttgctgcccatgggtaattcccaccaagggttcactagcaacactgcctcttctggcacaagaatctgcaactccaatctggtctctccaccaaccacagcgcccccagaccttggagaagcgcgttgtctgctctaggggcccagagccacctgctcggaatcttacctacaaccttttgcttcctacccaaatacctgatcaagagtaaagggacagtggcacagcccctcctctccagaaaccacaatctgcaatggagcactccatcaacccggacatcctcaggcctccactaaataagcccggcattggaggaggggagttctcaagatgtccccttacatcaatgcatgtgccctgtgttccagcaacctgggcatcctcaggccccagacaagagcaccacctgaccaagcacccgcgcatgcacgcagaggacagtcgcggaatatacagctgtatcagtaactccatcaaccccggtgacccgaggctaaagcgccacccgcacagataccaggtctccccgctacactcaccaccgcttccagcttcccgcgtagaccctgcgcatgcgcgcatcggacaccaagcgctgccccacgcccctaccaacctgggcgtccgctggcccgcagcccaggctgggcctgtcaccgcctcagtgcctagcacggctctgcggcaggacgaactcgggttaggcaaccccctgccccgattctgcaacacggccgactcgggttaagctagttcggtcccctctcctagtcagcatccgcaaggccgctgggggttaagtctgaagggccgagctgctcggcgacagcaagcgtccgcgcgcgggacaatggctgctcttgtggccgaacccggaagtgcacttgggctcggagagccagaactacaattcccagaagcctccgcggcgcggacggtcagtaggcggggttccggcttctccaaggaagtggggcgggggaccgggccagaagctaagagggcgtcctcgtccggggcccgggggggcgccacacctgtgcatgtgcaggtctagggggagcactaagaccagccgcggcgccgggaggccgaggccagtgcagcgacgcatggggagtcgctctggcgtgacgtcagaatccaatagaaatggcggggaccctttctgggtgccccctgcctgtcagacgctgcgcgcgaccccttgtctcctctagtcctaggggaaacctgtgagacagttgcgacatccccattttacagtggagggagcgtctaccgaacccttcaggaatctatgtttttacatttaataatactaaaatataatcattttatttttaaattttgagttctttctctgcctataaggcctgaaggatctgttccccccacctctccccttttctctgtttttgttttgttttgttttgttgttttgagacggaatttcgctcttgtcgcccaggctggagggcaatagcgcgatctcggctcactgcaacctccacctcccggattcaagcgattctcctgcctc[212 bp omitted]ttccccattctccaacagatccagcagactccagcccctggtcgtttgcaggtgctctttgcactccctagcagcctctcctgagggattcatttggctctcaccgtctggtaattaggggaatatcatcttctcatgaggcattgccccaccacccgttgtgaacttgcaagcaaacgcttccctccccacatgctctgtgcctcccccttcatcttttatttttttctctaaagaacttttcactatctagcacactatatattttaattatttatttggtctactgtccgacctaccactacgatgtcaattccataaggaaaagcattttatcgatgttgatcactgctgcatccccaacacctaaaaaaaaaaaaaagagagagacctggcacataatagatgctcaataaatattcgttggctaaataaaggttcctgtctctgtattaaacactttaatatttcattaccaagcccaatcagcctatgaggtagttgtgttaattttcatcctaccagggaggtagctgaaaattggagccctgctgtatgaaaatacataattttttagtttttaaaatgcttgtcaaagcactcctgtagttttcttcacgtaaattctgacctttaaaaacaatgaattattactatttgaaatgtaatctctatccccaaagcttcttattattggttattgtggttgatcttttaaaaaatacttattttgtatctggttaacctactgcaatgttattaattcttacaatactccagttgactctcttggcttttctattgagacagttatctacaatttcatcttttccttaccagtattttaaattagacattctctttcatgttggattatattggctaccatttccaaaaaagtattactaaaagaggcattcttgtttgtgttcttttaatggacatatctctgaagtttgagggttaaatgtgacatcggtttctacattgaagtaagtagcttatttttttaaccttttattttgtaaatttcaaaacaaaagtagggactcaattaatgactccccaagacctatgtcatccaacttaaatattttcactcagtcttgtttcatctgtatttccacctatgttgtgcatttgagaccaagatgttgaactctagagtccatgctcttaacttttacattatgttgccgcttgtctacacatcagtatctttcctctacgtgcaagcaatactaagtttgcaaacaaaacagaaaaagttcgtatgtattcacaaaaaagcaaaaaaaaaaagccttataagtaaatttagtaagataaatatgtcatctgaagaaaccctcaaaaccttactgagagagaaaaatggacaaatagaaatgctgtgttgctagctgtgtgttgtaaagatgtaaaatcttgcagattgatctgcaaatacaaatatgacaaaatcagaatgggatgctttgagtgttaggtcgtcttccttttttcacttcatttatttttctgctaattgtttaagatattcagaaaataggccaggcgcagtggctcacacctgtaatcctagtactttgggaggctaaggcaggccaatcatgaggtcaagagttcaagaccagtctggccaacatggcaaaactctgtgtctacttaaaaaatacaaaaattagacaggcatggtgatgcacgcctgtaatcccagctactcaggagtctgaggcagaagaatcgcttgaacctgggaggcagaggctgcaatgagccaagatcacgttgctacactccatcctgggcaacagagcaagactccatctcaaaaaaaaaaaacaattttcagaaaataaagcgttagtactatgtaatgtaaaactgactttgtttatctgtcttttgtttagtcttttttattttctttcacaatgaacaaggtggtaatgtttacttccaggaacctataaatcctgacttaacctgaatattacagggactttagaagagttaccactgctgggcgcagtggctcacgcctgtaatccccacactttgggaagccggagcaggaggatcacttgagcccaggagtttgagaccagcctgggcaacatggtgaaaccccgtctctacaaaaaatacaaaaattagctgggcctggtggcacaagctgtagtcccagctactcaggaggctgaggcaggaaggattgcctgagcccaggaagcagaggttgcagtgaaccaagattatgctactacactccagcctcagcgacagagccagaccctgtctcaaaataaataaatgaataaataaaaattttaaagagttaccactcaggaacattctagaaagatgcctatctaatctagagatttatctgtcaactgtcgggaagagctgagaccaaagtttatattaagattctgtttattggccatgaattggataagggctcaagatacagtgaagagcaagaagattatgaatccatttactataaatactagaaaacaaagtaagagtaacgagagggtaaaagggcatgatctgtctctaggatgtcagggggagggggacatttcttggcagggaagaggaaagttctcagggttcaaatagggtggtgtttctggtactactgagtgcaacccttaagatcctaattccggtctcttgtatcacatctaatgattaatttttaaaatctgaattaatgttatcatcattatgatagccattcagctccaaggatagcaacaacgcattctgaaaactcttcatttccaggagttttcagtgttggtttccccctgtgttaacagtccttttttgtctcctttgcttgatctctcctgtaaacatcagaggaacccaggaatcagctgtcagcctgtcccttgccttgtcttcatccactctgcttggggttgacataacaggcctattgctcaaactctgtaagttccccagaaggtcctgttttcctgactagcctttgggcagctctgggaactgagctctcataatgttctatctggtaagagtgcttttgtttgcctgaggccttgagccatgctgtaccactttgtccagatggtttatactaacagtgtaatttatggaggaacatctgctttccttctaggagtctggagcttcagtgactgaccctttataaaaaccatggacacccaggtttaggtgagcttccctcgatggcaatgcttcacacacgttgtcacacatcattgctgggggatttcccatgtgctgtggtttggatatttgtctcctccaaaactcatgttgaaacttaatccccagtgtggcaatattgagaggtgggggtttttaagaggtgattggctcatgagggttttgccttcatgaatggattaatccattcatggactaatggattaacgggttatcatgggagtggaactggtagcttcataagaaaagaaagagaaacatgagctaacatgttaccacactcagtccccttggcatgtgattccctgcaccacttcaggactccacagagagtccccaccagcaagaagtgctctcaccagatgcaacccctagaccttagacttctaagcctccataactgtaagaaataaatttcctttttaaaacaaattacccagatttagatattctgttataggccaaagaaagcagactaatacaccatgtgactccactgaaagagaacacttggaagctggtgcagggtatcctccagacttcaccccatgcaccttttccctttgctaattttattctccatccttttgctgtaataaactataaccatgagtataacaattgggtcctatgaattcctctagaaaatctttgagcatgaggtggtcttggggacccccctgacagaggagctcatccagccccataactttaagtcccactgacaactctcaaatgtgtatctccagccatgatctgtctagatttttatgaacaattgcctacttgattctgcaactgattcttgacatgtctaaattcttgacatgaagcaaattctttatttctctccttatcccaaagtttctcagaaagtgacctgccaatcatccagttgccctggcaagaaaccatggagatatccttgtctcctaactctctttaccttcagcaaatctcattctgactctctccgcccctgcagttctcaggattctaagcatttcatgcctacctctcctcaggagcctcaatccctcacttcactacgtgttttctccttttattaagagctcttaatttcttaagagctccttgttccttatcttctatcatgatttgaaaagccacttcttctctgacacctgtctttgtcccctactcctctctggctgactcagactcactcttctctctggagtccaccaacagtgtttgctcatcctcagcctgcaactatgatatcctaagctgttcagtctcaaaccttggtcctctaactctagatccacgggctgtcatttttacccttactattgctttgaaaaaaaatatgagtcaaaatctaagattctatggaagccagggcctgaccaacccattgcagtagaacatcacaaggtctacagagatgacagagaatgactggcttataatatgcacttaataaatgtcattaaatatatgatcaagcatggtttctctaggactcctggagaaaagatctctgcttccattagacggaggggttgatttggatgtaagtgttgggctctggattcacaagctcctgttaaacaaagagaaaatgtgagctccatttgctaggtggaccctcccagtctactcactgtagtctggggcccaaacagcctggagctttcctttctttggaaattccaaaaatcttcctccattctcatcacactttagtaaccctggcacatctctgttcctggaatggcccatgtacttccccactgtggtaaacagactctaaagtggtccccataatccctgcctcctggtattcattcctttatgtaatctcctccccttgagggcaagacctgtgacttgcatctaaccaatagaatatggcaaaggtggcaggatatacatgattgcatgtatgtgattctgttacataagattatgacttctgtcttggcttgaagaagcaagatgcaatgttgtgagctgcctgtggagagggccacatggcaaagaactgaggatgacctccagctgacagtaagaaactgaggccctcattatgacagcctgcaaggaactgaatgctgctaatgaccacatgagcttggaagtggatccatccccagctgagcctcagatgagacctgggctttgactggcaccttgattatacagccttgcagaagagctaactaagcaatgcctgaactcctgacccacagaaactgtgagataatgaattcatgttgttttaagctgcaaagtctgtggtaattcattatacagcaactgataactctacaccctcttcagggccttttttactgatgcctctcaagttggaatgtttcctttcatactgtttgcatggtttgctccttctaatccctccagaatgtagcagacactgagttcactgagttgactgacctaaccttcttccccacaccacctcccttgcttgcttctattgaagaggctgggaatgttaatgtaccactttctcagcctctgttgctacaaggagcaccatatgaccttattctggctaatgagatataagaggaagcttactaggtggtatttctgggaagaccttttgcccgactaataataggaaacaaacatggctcccctacgcagacactggtgaagagagggacttaggtggctaagtttttaccagttcaaagctgattagagagctgacaaaactaaacatgatccataccatggcctgaatcaatctgattcttctatggagaatttgaacctagaaatgcttaaagggcagcagaagatgttgttatatatactctgaagttatagagaagcaatgaccaggacatttacatagaaattcaatctggattgagaagaatgagatgaattcatagattagtgaaaatgagaaactgtataataagagagaaacagcttcttgatagcattcaagtcgccaagaggcccaggagtaatttctgaaattgagttatctgatatttctcagtgttctctcaattaatccccattcgaactacattcaaagggtttaactttcttaacattaaaaattcttgactaagatattaatatatgaaacattcagccaggtgcagtggcttgcgtctgtaatcccaatactctgggaggccaaggtgggatgatcgcttgagcccaggaatctgaggctgcagttggccatgatcgcactactgcacacaacctgggtgaaagagcaatacgttgtctcaaaaaactaaaaaggtgtataggatattcacatttttcaagaatagttatctgtctgttaggctaaaatctacccttcttttacctatcctccatggtaatttatgtgccctctggaacaacaaggaacacatttatccctctacttgaagcctgtcagacactaaaatattggagttctctgtccctaaactttctcttttccaaacccaagaaaaccctgtcagtaggacatggatttgagcccctgttctggcctctctcttattcctcctctggataaattctgactggtcactggcttgttcagaatatagaatctgaagtccattcttggaattggagtaatctggctgtcctgatgacagggttgagatcacttgcattctctaaaataattctactagtccttagaactatggagccatcacttgactgctctaaacttgttactggaattttgcttatgcctggatgaactaatagttttcttcttttttatttttttctttctgagacaaggtcttgttctgttgcccaggctggagtgcagtagctcgacctcagctcactgcaacctccgcctcccaggttcaagtgattcttctgcctcagcctcccaagtagctgggattacaggtgcctgccaccatgcccagctaatttttgtattttcagtagagacagcgtttcaccatga[138 bp omitted]tgttttattgttaccaggaagcttagagacacataagagatatagtggcagatatcacgtaggcccagtatatatttttactttttacccatatattgacttcttgctattgttaaaaatattttttctgattgtaatttctatttctaatttaacaccattttgtagtgttgtatataaactgcttcaaatcttccatgggaaaaactgcttcaaatctcccatgagaaaaatgtggggaagtaaatatcatgaatgaaatgaaagattggaaaggaaaggaaatgaatgaaaaggaatagactatttaggaatgtaactgaaagagatggcaaaggcataaatgaaatggagggaaattgaataggacagaaaggaatacaataaaaattaaaggcagagaatggagtgaaataaaatggcatgatgtccaaagaagtgcaaatgaaagaaattaaatgaaaaggaaaattgtaacagaaagaaagaaataaagtaaaataaaatggagcagaaaagagagtaataaaataaggtaatgaggggagagaagtggagaggaaattagagaaaagtaatatagtagaaggaaagtataacattaaagaataaaaataaagcaacgaaattaaaaaaaaaacagaaaaggggggaaatggaatgccatggaatataaaataatgaaatgaaatgaaactgaaatcaatggtataaagagtaggaaatgcaaaggactggaaagaaatggaaagaacttaaatgaaatgaaaaggagtggaatggaatgacttgaaaagaagaaattaaatggaaagcttgaaaaggaaagtaataaagacaagggaatgaagtgccataaagggcatgaagggagaggatgaagtgagaaaacatgcagtagaatggaatggaatagaatagagtggggtggattggaaagaaatgaaaagggaaaggaattgaagagaacagagggagaggaatggaaaacagtgaaatagaattgaatgaaagggaagggtatggagaagagaaagtgaatggaaaagaaagaagggaatgggaaaaaagaaaaattgaatggaaaagaaatataaagaataagaactggaatgtagtggaatgaagtgaaaaccaatcaaatggaaatgaatgtaaatagggacattgcctaggaaggaatggagaggtaggaaatagaacggatgaaatggattaaatatatggatggaaataagaagactgaaatgggatgggaagaataagaatggaaacgaaataaagtcgtgggatgggaattgagtgggctggaataaaacagagtgtaatggaatgtaaaataaatgaattgaaaggaattaaaagaaaaaataaaaatggataaaatgcaatagaaagaaaggaaaagaatgaaaaggaatgaaataagaaagagatggaaaggagtgtaaagggatcaaacaaagctgagtggaatggaatgaaaaggcatggaatgagccaggcagggtggctcattcctgtaatctcagcactttgggaggccaaggcgggcagatcaattgaggtcaggaattcaagaccagcctggccaacatggtgaaatcccgtctctaccaaaaaatacaaaaattagctgggtgtgatggctcgtgcctgcagtcctagctactcgggaagctgaagtgggagaatcccttgaacctgggaggcagaggttgcagtcatcagagattgagtcactgcactccagtctgggtgatggagcaagaccctgtctcaaaaaaaaaaagaaagatgaaaggaaggaaggaaggaaagaaagaaagaaagaaagaaagaaagaaagaaagaaagaaagaaagaaagaaagaaagaaaaaggaaggaaggaagaaagaaagagaagaaagaaaataaaaggcatggaatacagtagagtgaatgggaagagctgggatggggggaaatagagtggaaggaaataaaacccaatgggatggaaagaaaatggcagagtgaagtgatatagaaatacagaaaatgaataaagctaaatggatagaaaggaattgggtggagtgaaacatggaatgcaataaaatggagtgcgttggaaaggaatgaagtaaaaccaactagaaaatgacatgatggaaatggataggatggaattgagaagatttttaaagggaaatttttcttcatagttcatcctacagactctttagtagggaagaaaaagcagattggtgacagatttccacctgtccaaagactcagtgtggcataaacatacctcatagattgactccatgttttttggcacagtggagaccaatctgagtgggggcatcagaggtttgggtggtggcttccaggggctgaaagaattgcctctacggcttgctgaaggcagcttcgtctgcaagtaagcagagaaattaggcagggcccacagacacagattgccaggaatgtaccaacttacactcttcagggaccgagagagtggaaggaatctgttcaggttcttgcagagaatcagaggtggaagcagggttagaacccaggcccttgccctggcccagaactctcctttttcctgctggatctgcaacctctactcccagcctccttttcaccccagcatgtgctggtccagtaccacctcattggcaatccaattccaagccctggaggtggaaggaacgaaagaggatccagggtcatggcatctgacccagctctctgtgaggccttaggctactctcttcccatccctggccctgtgatgtgccatgaaatgtttagacaagatgatctctcaggcttatcacatataaaattttcagattgtctttccttcatagattctttaaccaaacccagcagggccaatgtacctcataggtctcctctggaaggtctggtggttgcatctggggaaaaacaaagttgcagagaggtcatagggcttggaataggggctaccccaagagatgctcagaaatagctttggcctcagaggcaattatagcacttctgattcccagagggctcaaagctaggaattgtcatgtcaaagaataagaagacgaggagaagagatgaaaaaacccgggagggtcttgagatcctcagagaagtcagaggaggagatgcagagagacttaacctggcactgggttttctcaaaagatcatgccagcccccaccctaagaagtaagactatagcagcctggtcaggggatcaaggagggttccctctgcagcatcactcaccagttcgactctgatccgtccctgaagctgggatatattgcgatactcaggactcaggctttctagaaaaagtgaatctcagtcaggagctggagttcgaaagagatatggggcaaggggctgtttttccaggacccctgaccccaggaaggaagtgcagaaatccttcccaggactccctgtcatatttccagtgagcttgaccaggaatgtcctggcaatcaaggtctgggttaggtaaggctgtttggtgacacagatgaggggagaaatctaaattctagcccagttttgacactgggtcctctgtagcctggatttagccctttatccctaatggccttggttttcgtctctataaaatggggctggattggacagtttctagaaagccttccatatcaaaaggcctatccttccagaatcccagacccagagatggcaaatacgtttcattttgtctttggttaactctaacccatcagtagagggcactcgaggcactctactgagatatgttatgaggctggatttggattcagcaggaaggagtgttgtggttgattcattctgtctacaacaatcagttaaaaaagtcttctgagattgagaaaggagagaattccagcctgttgtcctgcttttgccgggactgttggaacaggcagaacccatcagagggcttgactccaatctcatccaaattccagatgggaacacagaggctcagagtggacagggcttgccctgatcatacagtgacctggtggcaaagctgggagcccccagcaccagcctcttccccagccctcacccctgccccaggcatcagccaccatagagtcacttaccggaactgggctctgtggggtgctcctccttcgggatgggttgtgaggtctcatgactggggtcctctgttgttttccttgagggcctgaaaccccaaagccctcattattctgtgcctctagtccttgcccatctccacaggttctgcccatatcccatgtccattcttgaacaatgcccacaaccctctgaattccccaggtgccagacaagactcagcaccatggtcagcaacacgcccggcaagcgccccctgctggccacatccccatccccatccccctccctgtatccctgtgttaccgtctggcatttctgatgcagagaaaatagcccagttctgaggccacagcaatgacagccaggatcccgatgacaataccagcgatggcccctgaggacagggaggaggactggggacctgggcaaggagacagaatcaagacccaggcttgacacaccctcatccctgctcccagcccgttcccaagcttgcagctttttctctactgacattttgtgagcacttgttttccagtcgttgggaggtatcagattgtggtttttggttttgcttttttttttttttttttcagacagggtcttgctctgtcacccagactggagtggagtggcgtgacctcagctcactgcaacctccaggttcaagtgatcctcccacctcagcctcccctagtagctgggactacaagtacctgccaccatgcaggctgattttttgtattctttggtagagagggggtgtttcaccatgttggccaggctggtctggacctcctgacctcaagtgatccgcccacctcagcctcccaaagtgctgggattataggtgtaagccactgcacctgacctcagtctgtggtattaacagcatcatttctaaactaaaacatccagtttctgcgtccaaatttcagcagtgtgactttgggcatgctacttaacctctctaggcttcagttgtctcttttgtaaaatgggaacaatagggtttatagggcttctagaaagattaaacatacatgtattcattttctatatatatagtgtttgtttggaaccatggaaagtgatcagtaaatgttggccatgatgacaatgtcagttaggataatggatcaaatatggctttgtgtttctttcctcccagaatagaggcacagaccagagaaaagagctttggcaaccagaaacccggctttcacttagagccccttgactcactgcggccatgtgaccctggacaagtgaattcatttctgagtctcatttcttcatctgtaaatagcacaggatgtttgcaaagatgagatgaaatcatgaatgttaacacctggcacatactaggtgattaataaatggcaattgttttcatcaatattggcctgccgattgcccatctcacttctgcctgaacctctctcaaaagggtggaatcgagccactgagttaagaacacagctacaaggatcaggagggtgaggaaggagctctgctttggaggggcaggagggaacttcctggggtgcttcagggattcttaggttcatttctgcatctccactttttttttttttgagatggagtctcactctgttgcccaggctggagtgcaatagtgtgatctcagctcactgcaacctccacctccctggttcaagcaattcttctgcttcaccctcccaagtagctggaattacaggtgtgcactgccatgcctggctaatttgtgtgtgtgtgtgtatttttagtagagatggggtttcgccatgttggccaggctggtctcaaactcctgacctcaggtgatccaccctcctcgacctcccaaactgctcagattacaggcatgagccaccatgcctggccgcatctccatttctttatatgccaagcaaggataagaattccaaactctatagactttttaaaattttttttaaatttttaaattttaaaatttaaggccaggctggagtgcagtggcacgatcttggctcactgcaacctctccctcctctgcaaccactgcaacctcgctgcctcccaagtgattctcctgtctcagcctcccgagtagtgtgattacaggtacccaccaccacgcctggctaatttttgtatttttagtagagattgggtttcaccatgttgccccggctggtcttcaactcctgaccatatgtgatccacctgcctcaacctcccaaagtgctgggattacagacttgagccacagtgcccggcctctatagacttttgaagggattaatgagatcttgtataaaactactagcacagtgcctgatacataccagatgcttgacaaatgatgatgatgatgatgatgatgatgatgatgatgatagaagctgctatctagcaagctctaagcaccaagagaccttcatacatgatcttattcaaatcctacaatatccccgtgagcatcaactgaactccctgctgccttccctgagcctgttgctccatccatcaaatggtcttaataagaccacaagattgttctgaagattaaatgaggtaatttggaagttgatataaatggtgtcctaggcttagtgaacaacttgaggaggccagcctggtttcaaaccccaatgacaggatttgagtctataggtctcagtttcccttcctgtacaatgaagaaaccaacaggctcacctcaaaactggctgacagagagtacccaagaagtgtttgctgatattatatatgggaaagttggattcagacatgtggcacaggctcaataaataataattttaggctgagcttcgtggctcaagtctgtaatctcagcacgttgggaggctgaagcgggacgatcacttgagcccaggagtttgagaccagcctatgcaacatagggaggccccgtctctacaaaaaaatataaataaaaaactagctagctgtggtggtgcacacctgtagtcccagcttctcaggatgctgaggtaggaggatagcttgagtgtgggaggttgaggcttcagtgacccatgatcatgccacacacacaaaaaaaggaataattttatttgtttaacaaacacaatatgccaagcactgccctaagaactttacaaatgttcacaaccttcaacaaccctaagaaataggcagaattattatgttttacagataataaatcagaggcccagagagggtaagtaacttgtccaaggtcacacagctaacaagcattggagaaggatgtgaatcccagtgaacagtgacactgttaccttctcaagaactaaagacagagatacagggactccctgccagtcatgtccagttgttattaacatcatttccgattccccatatagctcactccttccctcactgggtatatctctgactcattgtccttctaagcaactctgaaagataggcatcacgatatgatttggctgtgtccccacccaaatctcatcttgaattgtagctcccataattcccaagtgttgtgggagggacctggtgggagataattgaatcatgggggtggtttcccccatactgttctcatggtagtgaataagtctcacgagatctgatggttttataaagggtttccccttttgcttggttctcattctctcttgtctgccaccatgtaagacatgcctttcgccttccaccatgattgtgacacctccctggccacgtggaactgtgagtccattaaacctctttttctttataaattacccagtcttcagcatgtctttatcagcagcatgaaaatggactaatacacatcacaaacccaatttacaggcaaacaaactgaagctcagaacagcttggagagttttccagggaacacagcaggaagtacaggttctacatttccctgaccactaggggttgggattcaacagctgtggactgagaacctgctcaggcagtgtggagactgccacactccagccctcggtaggggtagactaggtagctgggaccagcatcaggaaaggcccctcgggtcctgggagaaggcgaccctgagagactcacctaccaccttgaccaggactgaagtggagcgggccaggccagtgagagagttggaggctgtgcagttgtagatcccgtcgtgttcccaggtcagagccctgataatcagctgctcacccaggtgctccccggtggagtgttcaagagtccagcgatactcagcacctggcttggactcggcccaacactgcagggtcaggctggagttgagctctgcctctatggtgctgatcatctcagatgccgactccctggtgatgtgcacttggtcaggaccatctgtgtgtaaagccaaacgtgatgcaccctggcccccatcagcgagtcatcccattctgccccattcactttcaccttggaatttcagtaaaataaacagaacatactcccttttcctccttagctctctgacaagcagagtgtggtccacaacactgggggtggggcagatcaaaacaaaaacaagggccaggcatggtggctcatgcctgtaattaatcccagcactttggaaggccgaggcaggcagatcacgaggtcaggagatcgagaccattctggctaacatggtgaaaccccgtatctactaaaaatacaaaaaattagccgggcgtagtggcacgcacctgtagtcccagctactcgggaggctgaggctacagaattgcttgaacatgggtggtggaggttgcagtgagccaagctcatgccactgcactccagcctgggcgacagagcaagattccatctcaaaaaaaaaaaaaaaagaaaaaaaactgcctttgtaaaagttaattcaaagaagtgttttaggtcacccaggcatcagaaattgttgctaggccaagcgcagtggctcacacctgtaatcttagcactctgggaagccgaggtaggtggatgtgagtggaactcctgagaccaggagttcaaaaccagcctgaccagtgtggcgaatcacgtctctactgaaaaataaaaataaaaactagctggatgtggtagcacatgcctgtaattgcagctactcgagtggctaagaatcacttgaacctgggaggccgaagttgcagtgaggcaagattgtgccactgcactccgtcctaggtgatagagtgagactcaaaaggaaagaggaaagaaagaaagaaagaaagaaaggaaggaaggaaggaaggaaggaaggaaggaaggaaggaaggaaggaaggaaggaaggaaggaagaaagcaggcaggcaggcaggcaggcaggcaagaaggaaggaaggaaggagagagagagagagagaaaggaaggaaggaaggaaggaaggaaaggagggaaattgtggctgcgtcctgtgtatataatccctaacttctagtactgtgtattctcaatggtataaacacgtgcaaattttctttgtaatgtcagaggggatcattgtcacttttctcttccaccacatataagaaggaaacaaatgaaagtagttgttggatttctcatataaattaaaagagtttaggcctggggctgaggctcatgcctgtaatcccagcactttgggaggctgaggcagggagatcacttgagttcagggattcaagaccagcctacgcaacatagtaagaccctgtctctatttaaaaaaaaaaacctaaaagagtttaagagtcatactttatttaaattaatgtaaaatactggaaaggatgcaaaaggttgctaattgagacattctaggaggggaggaataccctgactctgctccctcctaaacatcatttgaacctgctcatttctccccatcctgaccccattgacacttggatccttcacctgcatcccagctcctcctggtctccccatcccagtctcatcctccacacagcagccagagaagtcttcctaagtactaaagtgtcactgtccctcctgtgttcagaaccctctgtggctccccagtgcccttgggacaaagcctatgtctgaagaggccatttacaatttgattcttacagaccccctccagccccacctttccacacctcttgctctcattcaggaattaaatcccactcggagattccatccttgttacactctctcttgcctcaaggccatcgcacactctcttccctctgtctagaatgctcttccctgactctgctctaagcagcctactcctactcatccttcagctcttatggtggacatccccattcatgatgaccctttgcaacatcccccagatggaggcttcctttgggctccccataccctccctttgtcccccggggtcccatttatcatgctatgttttatctgcctgcttagtgacctccccatccccagcaggctgtgaaagctgaaaatcatgtcaagtatcaaatgcccaacatgttgcttagcacagagagagcacaaaacatatatttttggtttaatgactgaattgaaaaggaaagaggagtgagcaacagagaagtgtaaagaggagcaaagacatgtactcaacccctacctctgtgttccctactgcttcgcatgtatgaaagtgcacccctcctttctctccctgcagaaacctcttctcccccaatcttctccatcttggttcgtgactcctacatcctttcggtggctcaggcaataaaccttacagtcattcttgactcctttctttctctttcacctaatatcagtcagcagcatattcaaaatacatccacagtgcaaccatttctcaacacccgacagttgccattctggtccagccctatcatctcttgctgcgcaactctggccaccaggagaagctcttcaaagacctccaacggcagaaatgtaattgaccaagggcccaattgctgtgcccccaaatctactcccagcccttccacaggctgcaccctgccagtacctgagtgcatccaggaaactaaggcaggccccttcctgggagatatggaaggtcccaacagccatgatgggtgttccttcaagtgcatggttatccaggtgcttccattcaagtctctgtccctcaccctgtcactcggggtcacacttgcatctcagtctctcagtctgatggctctcccagcctccctgcagctgcctccctagttatcctcacaggagcatttcccctaataaaacccttgcatgaataatcccgttaatcccaccttggggtctgcttctccaaggatctggacaaatacaactccttctctcactccccctctcccccacttctatgtttgcctccctgtagacaaaggccagtgagaccctgtgaaagcctaaatctggtggtgtccctaagccttatcacctgcttctctgtttatggtctggcttctccactagaacataagccccctgagggcaggcacttggccctgtccagtgcccagattcatgcctgacacagagcaggagctcaataatcatagcatgaatgactagaaggaagaacttaaagagaaggagggaagcagggagatggggaaggtccaggccctgggtgactcacagttgatggtcagctcaaggggctcactccgggcccggctgccccagttccagacctcacaggcatagggcccggtgtcattccgctggaggccatggatgattagggtcctgttgtcagctgacagctgcaggtgctcactgggcaggaggggctggccacttaggaaccactggacattcacactctgattgacggtttggcaggtcaggtccacagacctagcattctccacaaggttcaggcttgaaggcacgacttgaggcatggtcagtgtttctggaaacacgtggagatacacagtcaggttcagggagatttccctcatctcctgcccttgtggggcccacaagtttttccaggagtgcgtgcgtgtgtgtgtgtgtgtgtgtgtgttacaggtggtgtatatgatttgcataatgctggtgtgcggggtacgtgtatgtcttttgtggatgaatgtgtgtcgtgtgattattatgtgaatatgcaatgagttttgtgtgtatggagagtgtgtggtgtgtaagtgttttgcgtctcttgtgtgtgttgggtgtatgtgttgaatatgaagtatgtgtgtggtacacatatgcactttgtatgtgagtatatgctatgtgtatatatttgttgtatatgaatgtgtgttctgtgtctgtggtattgtttgtgttatgtgtttgtgttgtgtgatgtgtgcatatgctgtatgtgctgcatgtggtatgtgtgtgcattttgtgtgtgcattgtgtgtctgttgtatatatgtgttgagggtgttgactgtatggtatatggtgtgttttccatgttgtccatcttgagtgtctgtgatgtttaatggttgtaatgtttagtaggtgctgaatgtcaatgatatgtgttgtgtgtgtccattagtgcatattaggtgtatatatattttatgtgagtgtgtcatgtatatgtgatcttgtttgttgtgtagatgtatgtgagatatgtatgtctgcgttttgtatgtcatgtgtgttgtacatgtgttgtatgtgtgagcattttgtgtgtgtgttgtgagtttgtgtatatgtgttgtgggtttgtatgtatatgctgtgtgtatatgtgtatgtgctgtgggtttgtgtgtatgtgctatgggtttgtatgtgttgtgggtttgtgtgtatgtgttgtatgtctgatgtgttacgtactttgtgatgagtgagttgtacacctctgttgtgtgcatgctatatgtttgtatgttttgtgtgagtgtgtgttgtatgtctgtggtattgcacagttgtgtacgtattatatatgagttgtgtttactgtgtgtattgtacatgcacgtgagtgtgctgttcatgtggggatattatctgtgtgtgtacggagtgtgtgaatgttgtgttagtgtttttaaatgtagacagttaaaccccccacctccagagagtcaaatcatgggcaacccctagagagccaccagggtctcgtgcaggatgtgccaagccaggcaaaggagccagtgtgcccagccttccctgtagtcggagccctgctgcattggaaatccccctgggtcctcctcaaactctggggtatt[131 bp omitted]cctcagcctcctgagtagctgggactacaggcgcccaccaccacacctggctaattttttgtatttttagtagagacagggttt[141 bp omitted]atctgatgacaatcctagatccttcctctagaacacagcgcaaacatttttcatgcaactcaatgtcatgcagggatttctccctcacacagtatccaaaggccctggattaagaactcctggttccttctgacatggccagcatctgacgctcagaagaatgaaggagaggaaccgggaaaggagactcaccaagtactcggaccttcagagtacccaggctggacaggtgggtggcactgttggacaccaagcacctgtacaggccctcatgttctctggacacagcatggatggtgaatgttctcgtggtgtgagacagaatggagtcaaggagaaaccaagtataggcacagggtgggtgagactttgtttccgctaagaaggtcatgctggagccctccatcacctcaaccacctccccactggcaacaccagactccaatttgatttcaacaggatcaggaccatctgagaggacaggaacaattacagcagtaacaacagcatcagcaacaggtctcttatggaggtctttaacggatcaataaatactttatttccctcctccccactcaaaggctagatcaattgcaaacgaggtacagcagtcagatggagatgaaatgtcagcctcatccctgggtaaagcaagattgaaagacacgtctaaagtatgccagctgaatggttattgtagctcacacctgtaatcccagcattttgggaggctgaggcaagagaattgcttggagcaaggagtttaaaaccagtcagggcaacataccaagatcccatctctacaaaaaatttaaaaattagcccggtgcaatggctcatgcctgtagtcccagctactcgggaggctgaggcaggaggatcgcttgagcccaggaggtcgaggctgcattgagctatgattgcaccactgcactccagcctggacagcagagagaaatcttgtctcaaatgaatgaatgaatgaatgaatgaatgaatgaatgaataaagtgagccagctaatgctctttgctcacccctatccaggcaaggttttggatcaaacgtctgaggtttgggagctcaattttagttgagcttcacattaaggcatacaggcatgagccattgcaccgggctaatttttaaattttttgtagagatgggatcttggtatgttgccctgactggttttaaactccttgctccaagcaatcctcttgcctcagcctcccaaaatgctgggattacaggtgtgagctacaataaccattcagctggcatactttaggcatgtctttcaatcttactttacccagggatgaagctgacatttcatctccatctgactgctgtacctcgtttgcttcacattaagttggaggtttccagtagaatccaagtagagatgtcaaacagttatatgtctgaagttcaaaggtagacaagtccgcatctggatggtatttcaagctgtgagactgaacgaggcactaagcaagtgagtgtcagtgaggggttggagagaatggaaagggactcacacttcacatccaggaagatggggtcgctcctctggctcagaagggcatctcgagcttcacattggtaagtccctgagtcctcccgctggacaatgagaatggtgaggatcttgccatccttggacagctgcatgcgctcatggaacacaatggagaggttgttggaaacccagtggatggtaatgttgacgtccttagtggtgcagtagaaggtcaccatgtccttctgctctatggcagtgcctgggctgactgcaatggagggtttggccagctctgaaagcaagcgagggagacagaggcagagacacaggtagaggaagaacaaacaagacatagtcacagagggacccagagaaacaggactagattggaattgccagaagactctctggagttggatgcctgggcttgaatgctggatctactgctcattcttggtgtcatcttcggcaagttacttcccctctccaagccccattgaaagtgattgtgcaagtgaggcagagggtctgggacctgacaaggagtcaatcaatgtcagctgcaatgacaatcaagcttacgacatgggtgccagcaagggccccctacccactctttttctttattgaaacagggtttcattctgtcacccaggctggagtgcagtggttcaatcacggctcactgcaaccttgacctcatgggctcaagcgatcctcccacctcagcttcccaaatagctgggactacaggcgtgcaccaccaaacctggaggattttgtgttttttttgtacacatggggtccccctatgttgcccaggtgggtctcaaactcctgggctcaagtaatccacccacctcaacctcccaaagtgctggaatggcaggtgtaaggaactgcacccagcccccctacccactttttagccaactttgcccaccccagccatgacagccacagccctccctctttacccctgacccctggcacagctgactgaaccagttgttgctggaccctggctgagccaatcagattcgtcctctggggactttgggcgtgaggttcggatgagggatctccatggaggcagagatcagaatgaccgtcttgttttctggcccctacctctggatctgccatgaatctggggtgtcctgggggtcccaaacacaggcagaacaacatcctcactttgggtggcatcaagtgggttggcattgagggtgagctgggctgcagctggaggactccatacggtacaaagcgaggctacaaggggagagaggaggcattcagggagggagaggtgtgttgggggttgcccggctaaggtcttcagaagcacagggagctctgaggccataggactggcattccacccacagagacctgagtcctactcgttacttacagctatgtgacctgcagcatgttttcttgtttgtttggtttttgtttgtgtatgtgtttttgtttttgttttttgaggcagagtctggctctgtcacccaggctggcatgcagtggcgcaatctcagctcactgcaatcactgcctcccaggttcaagggattctccagcctcagcctcccaagtagccaggattagaggcacaggccaccatgcccggctaatttttgtatttttagtagagacggggtttcgccatgttggccaggctggtctcaaactcctgacctcaaatgacctgcccgcctcggcctcccaaagtgctggaattacaggcatgagcccctgtgccagctgcagcatgtttttgtcctctctgagcctcaatctcctcaactgtaaaatgggcatactatcacctgcttcctagggttgttgtgggggtggcaatgaatattggcaaactttgactgggtcccctgatagtcactgtgttctctccaatgatgtgccctctactggagacacgtgatggtccctgtattccacatagagaaaaaaccgatgctcagagaggtgatgtcactcaccaagatggtattgtcaatggcagaagctaaacttgaacctggcctgccaggccctgaagactgtgctctcaacactgtaattcctcctgtcagcccagagatggccacacagccaacccttgattaacaggtacttctactgtgatcttggtgaaaaatattaacttttggtacttcctctgatgtgccccaggcaagatctcacttgcatggggaggaaaggagaacaagatagcaggtttccagttttcaacggggtgtggtggctcatgcctgtaatctcaggactttgggaggctgaagtgggaggatcacttgagctaaggaatttgagaccagcctgggcaacatagtgaagctctgtctctaccaaaaatttttaaaattagctgggggtgttggcccgcatctgtagtcccagctacagtctgaaatgggaggatcacttgagcctgggagtttgaggctgcagtgagctatgattgcaccactgcactccagcctgggtgacggcaaaatcctgtcttaaaaaaaaaaatagaaacacacaaaaaaatgagttcccagttttccatttgatcattctgcacaccactacgggggctgcaagagactatgggacctggcgcggtggctcatgcttgtaatcccagctctttggaaggcggaggtgggtggatcacttgaggacaagagttcgagacctggtcaacatggtgaaaccccgtctctacaaaaaaatacaaaaattagccaggtatggtgatgtgcacctgtaacctcagctacttgggaggctgaggcacaagaatctcttgaacccaggaggaagaggttgtcgtgagccgagattgtgccactgcactccagcctgggtgacagagctagaccttgtctcaaaaacaaacaaacaaacaaaaaaaaaacacgagactttgctggggcccaaccccagcagctgtgctcacacgcaactgatctcatctctcccatgagctcaattaacacagaccctctgcacttctcaaaagggccccaatgtggcccaaacactgccccattccctgcccagtgagtgaataagggcacgagctcttaggaacaaatatgaactctgtcacttactagccctactatcatgggtaagggactttctctttgtgagcctcagtttcttccactgaaaaatggagataatagtagaactcagctcatctggtggttgtgaaggctgagtgagatatcaaatgtggcatgcttaacacagttcatagcaaatattcagccaccatgatggcaacgatgatgatgatggtggtggtcttgatgatgagttcttgtgtctgtggtttctctgcctcaaatgctattagaggttaggctcacagcctcagagcctgaccacctgggtttgaatctcatctttgccatttatttggtcaagtgatgttccctatctgagcctcagtttccccatttgaaaaatggcggtagtaacagttccagcctcacttaactgtcataaggataagtgaaatgatgtaagcaaaagcactgatggggcctcatcatacccacccgagacaggaagcctctctgtggaaagcctgccatggccccttccctctggctttcttctcacagggtcctgccgttgtcctaccaggaagaggcaacacttacagactcactgtggatgcggctgataactctcagcctcccaggactacagagcccctgcacccttccagggttagccaggaagcgccggcccagagaaggagaagctggtctcagggacacacagcaaggctgggctgagccctcacctctgcacatgacctgttgcaaaatcatgtcttcacttccaaaatacttttttcatcaaaatattctagtttctgccttttgtctcagatgccttctaggcagaaatttcacatccatccccatcctgatccgtggacctggccgctcagggctggcacagcctccctccacctgtctctcatctgcttgtctgaatctctgtgatactccaactctctccccgcgtttctgaatctatttctggctgtgtatttacccagttctttccctgtctctttgtcctctgtctccctctctttctgccccttcctgtttttcccactggtatctctttctttcttttctttctttcttttctttctttcctttctttctttcctttctttctttcctttctttctctctctccctttccctctttctttcttctttttcttttttttgacagagtcttactctgtcacacaggctggagtgtaatggcacaatctcggttcactgcaacttctgcctcccaggttcaagcaattatctgcctcagcctcccgagtagctgggattacaggtgcccgccaccacactcagctaattttcgtatttttagtagagacggtttcaccatctt[132 bp omitted]gtctctgtctctgtgcgtatctcttctccctgtatttctctctctttctccctgggtctctggttctgtggctgtgactccatctttctctgtctctctctctttctctgtgtacacagacacacaaacacacatctttgtctttctctcttgtctctggtctctgtttatgtctccttctgtcagtctcttgcatctgtatttttttctgtctctgtctctctgtgtctgtttctctctctgcctctgtcactctttcctcaagtatacacacacacacacacaccactgacaaatatacatatatctttgtctctctgtctctggtctctgtttatgtctccttctatctcttttgtatctatgtttatttctgtatttctctctttctttcttttttttttttttttttttgagacagggtcttgctgtgtcactcaaactagagtgctatggtgtcatctcagctcactgcagcttccacctccgagttcaaggttcaagtgattctcctacctcagcctcccaaatagctgggactataggagtgtaccaccacacccagctaatttttgtatttttagtagagacgggggtttgccatgctggccaggctggtctcaaactcctggcctcaagtgatccacccacctcggcctcccaaagtgctgggattacagatgtgagccaccacgcctggccctatctttatatctgtatctgtctttatttctgtctctgtctctgtgtctctattttttttctctgcctccatctctttttcctcgagtgcacacacacacacacacacacacacacacacacacacacaccgctgacaaatagatgcatacaacctccctcctcccgcatctgaaggaagcagggcactcacctgaaagcaggattcccatccagtggtgtccccatgagtcagcaggccccatgggtcccggcacctgacttcagtgtgccaggccgtctgtcgccccggcttgcacacacagatacagtcctcactccaggtgcagcccctccacctcccttctctcctctcccaccctgctacaaactcacacacacactgcagtaactgcagctcccaggacagacaggggtggtggcaggaaagtaactttgaccccacctctgccctctacccccagggctcactttccttccctgcccagcacaaagagcgggaagtccaggaaccctggagaccgggaactgcgattacgatagtcaatagcaatgataataaaaaacaacaatgaccagctccttgtccccgagagcttaataaccagtcccagtgccaagttcattataagcagccaataaatattaaatgagccggaatcatgcttgtgatatagatcctggtcataaacaaaagctctggagtcagaccggcaggaatctcagactgagcaggactgggggacctccaggaggagcctgacgtggtcttgggagaaggggcagggagggcctcctggaggagtggacatctgagctgaaacttcgagaacatagtaaaggttccatatataaaagttacttaaaaaaaaatctctatgacaagacaagctggtggtctttgacagtgtatagacctagacccagaagatttaacagaaccgaccagctgagggaactatcattaatccatgtatccatccattaatttaacaaatacttcctgaattctcttccttttttttttttttgagatggagtcttgctctgttgcccaggctggagtgcagtggcatgatttcccctccctgcaacctccacctcccaggctcaagtaattctcctgcctcagcctgcctagtagctgcaactacaggcgtgcgcctccacacccagctaatttttgtatttttagtagagacggaatttcaccacgtagcccaggctggtcttcaactcatgagctcaagcaatccgcccgcctcagcctcccgaagtgctgggattacagacgtgagccgtcgcgcccagtcctgaattctctcctatgctgacccctgctcctggtggtactggggacacagctctgactaagacagccccaaccctgttctcacagaggctcacagtccagtgggggagacagaactgtccccagacagtgacaacccagagtgggcagggctgggatggaggaattcaaagggggcgcctggctcagcttcaggatcagggagagcttcctggaagaggggacatggtagctgagacctgaacaacataggggtgagccagggggagcagcatgtgaaaagtttttgaaattggggcacagaaggaaggtcaggtgggtctagaatagaggaagtgagagaggatggatgattcaacaggcggcttagaaaactctggaactgttacttagggtatgaggggcagcttggcattgcaagaaagagatcgtgactcactcagctgcctcgttttgctgccctgcttccgtcttgctcctgctacaggcagtcacaaagtatctgccctgataaagcataaggccgagccagctggctctggagccagagtgcatgggttcaaatcctgactccccgacttgctaactgggtggcctcagcaggtcagctcccctctctagggactactttcctcagctctaaaatggagatgatgcccaggcacactggctcacatctgtaatcccagcactttgggaggctaaggtgggaggatcacttgagcccaggagttcaagaccagcctgggcaacatagtgagaccccatctcaattaaaataaaataaagcagagtagatgatgatgcttttgtctcctaggaagctctgtggttatgagcacttgacctcagtgtgccaggccatctgtcacccttgcttgtggcaccatttacaagcactaggctagctggctgcctgggctggcaagacagtcctttacatcccagccatggttcattgggaaaaatttgtcacccttgcatgcttccgtgtgctccatctgcagactgggagaaatcacagactccccgcacaagacggttgtgaggatcgaatgagtgagtgccaggaaagtgctcagagcaatgcctggcacagcgtaagccatcaacaaatgtgaattcccactggatgtcatgactgccctgcatcataatctcactgcagccctgtgagggggtacgcattcattcactctgttactgctgtggactgaatgtttgtctctctgtcattcagatgttgaagaaatcctgatcctgcacgtgatggttttaggaggcagaaactttgggaggtaatcaggtccctcccaatgggattagtgctcttataaaagggacctcagagagctctcttgttcactttccaccacgtggggaatgcaacaagaagacagcagtctgtcacccaagaagagagcccccaccagaacctgacaaagctaccaccctcatataggccttccagcctccagaactgcatgaaatagctttctgttctttacaaatcacccattctgtggtctgttctagcagcccgaactgaccgagagccactcaacatatatttcgtgagtgtctactgtgcctgttctaggtgctggggacatagcaggtaatgagaccatcagacgaggccaggtgcagtggctcatgcccataaatccaacactttgggaggccaaggtgggatgattgcttgagcccaggagtttgagaccagcctgggcacccctctctacaaaaaaattaaaataaaaaaaaataggcatagtggtgcgtatctgtggttgcagctactcaggaggctgaagagggaggattgcttgggtctgggagttcgaggctgcagtgagccatgatcgcaccgctgcactccagcctgggtgatggagcaagactctgaaaaaaaaaaaagaaaaagaaagaaagaaagagaaagaaaggaaagaaaggaaagaaaggaaagaaaggaagaaagaaagaaaagaaagaaagaaagaaagaaagaaagaaagaaagaaagaaagaaagaaagaaagaaagaaagaaaagaaagaaaggagggagggagggaaggaaggaaggaagaaaggaaggagaaaaaaaaaagagtggggtaaggaatatgattattccatcccatagttaaaaacactgaagctcacagaggtgagatgacttggataaagtcacaggacatctcaggccctggccctcaacctccatgtgcgtgtgcctttttccaagggcccttcgctattccccagccacacctttctgtacacccagatcaatgaacaccaatgtggccacatcaccccgccacgccttcagactctatgggtccctgtactgaaggcgcctgacccagaccagcccagcattcaaggcctctgccacccacctcgttcttcccagaatgtctgaaccttctgaccacccaccttctcctaagccagcttccctccccaccacctctgccctgaggcactctcccctcttcccctcctccccatccaagacaacagagctgctgctggaatggacttcccaaatctgccccttcatgcaaaagcagggtttcctctcctgaaattcccaccaactcacccactcagcccccagggcagattctgttttttgctgccccaaggaaagaaagggactttctgggcccctccctgtagcacaacttccaattatttccaacaggtgaaaataaaccaggtcctctccacttcccacccttacctaccaggtctcagccatgcaggctggctcaaaattgtgtcttcccacgggactgacctcccagcccaggatgctgccctatgactgtgccctcactgaggccattcactcagcaaagatttgtatggccctactatgtgccaggcactgtttcaggtatcagggcacgccagcaaatgaaacaaacagagatctctgcctttatagaaatgacatgtaatgagtgctgggaggggaggagggagacagataataattgagatacgtggaaaataactggctgggcacagtggctcatgcctgtaatctcgacatttcgggaggctgaggcaggaggatcacttgaacccaggagtttaagaccagcctgggcaatgtagcaagatcccatctcaaagtaaataaataaatgtgcttttttaaacatttaaaaacatgaaaatattaaaattaatttttttttaaaaaaattagaaaacgtagccagccacagtggctcatgcctgtaatcccagcactttgggaagctgaggtggaagaatcacttgagcccaggagttcaagaccagcctggacaacatagggagatccccatctctacataagatcaaagttagctgggtatggtggtgtgtgcctgtactcccagctactcagaaggctgaggcaggaggatcactgcctggagtttaagaccagcctgggcaacatagcaggatctcacctcaaagtaaataaataaatgcttttaaaaaatttaagaatgcagaaacattaaaaataaaaaaataataattaggaaatgtggccaggcacagtggctcatgactgtaatcccagcactttgggaggttgaggtgggagaattgcttgaacccaggagttcaagaccagcctgggcaacataaggagaacccatttcaacacaagatcaaaaagttagctgggtatggtgatgtgtgcctgtactcccagctactagggaggatgaggcaggaggatcacttgagcccaggagtttgaggctgcagtgagctataatcatgccactgcactccagcctgggtgacagagtagctgggattttgtctctaatataaataaatgaataaataagtggaaaattactaaactatctatgatgttggaaagtgatgtgtgccatgggggatgagggcaggcagcgtcagagtgccagagtgggcacgcaggattcaatgctaaagcaggcagtctgggtagccccatggagttttaagcaacgacttgaaggaggtgagagggcaaaatgtacatacatttggaggtttctaagaattaattcacttctgaaaaaaaaaaatgcaggcagagtcccaaggagccattccctgcctcctgcatttaaataactgagttttctatctgctgccacaataaatgcctccagacttggcagcttaaaacaacataagtttatccttttgcagttctgtagatagaagtccaggatggctaaatgacttctctgctctgggctttatggagctaaaataaaggtgttggcagctgagctcttaatgggggagctttgggaagaatctgcttccaagctgtcattcaggctgtggttggcagaatcaaactccttggtattataaagctggaaacctgtttctgcgatggttgccagctgagggctgcccttagctctggaggcctctctcctgtccttgcctttgagcctgtacatctcagagccagcaacgccacaacaaatccttctcgggcttgggatctctctggattccctgtctgctgcatctcttcacaattttttttttctttttagagacagggtctccctctgtcgcccaagcagtggtgcaatcatagctcactgcagccttgaactcctgggctgaagaaatcctcctgccttggcctccaaaagcactgggattacaggcatgagccactgcaccaggccctctgtctgccgtgtctctcttctgcttccagctggggaaagttatctgctttgaagggcttgggtgattaggttggacccaccttgataatccaggataatctccttattttgaagtttgtaactgtattagtccgttttcacactgctgataaactgagcagcttacaaaagaaagagatttaatggacttacagttccacatgacgggggaggcctcacaatcatggcagaaggcaaggaggagcaagtcacatcttacatgggtggcagcaggcaaagagagagcttgtacagggaaactcccccttataaaaccatcagatctcatgagacttattcactctcaggagaacagcacaggaaagacctgcccccctgattcaattacctcccaccaggtccctcccacaatacacgggaattcagatgagatttgggtggggaccacaaaacctaaccacatcagtaaccttaattacatctgcaaagtcattttgcttttgtaatgtaacatattcacaggtttgttcattttttatggctgagtagtatttcatggtgaatatatatcacaggttccaggaactaggatgtgggcacctttggtggggggtcactattctgcctaccataatgacatgatgtgaaagcaggaatgtctagagttcaggcagccattctgagaccatgaagtagcaagttcagcaggatatgcaatgcactgagggtggagggatggatgagaggatatcactgagccatagaataaacctagggcatcttgcaaaatgacaattatgatttttgccgctgtgatccaggttgtcttttgtttgcagctgaatgcattctacctggctcctttccagatcaccattggaagtgtttattggaagaccttgcatcaaaaccctgatctttcagaaacatagagtttgtagtagtgttctttttcttaaagtgtgctaaaacttgtaaaatcgactttgagaaagagcctactcaaaattactcttctgtttaaacagagattccagtctaagctcccttttatcccatatggggaaactagggcccagagggtacagtgaagtttttctccagggtcatagaactgagtcttcttggaacatctgggaaactcagttttgtaccgttgactttttgtgcttttcctgtgtacaagaagcaagatcagtataaatgggaaaataaataatgcagatccaggtaatagaatcccaacatctcatacccaagaacccctacacacacacacacacacatgcacacacaacacatcatcatcatcgttgtcgtcatcgtcatcctcatcatcaccatcattatcctgccccctgcagcctctacaccatacttgtttccatgactccttaaattcctagaatggcacagaaaacagacaaaagattagctcacagatgctattttattaaactcatgatgcccactgacatagaaagggacatatgttttctgagtcatggttcaaaggagtaaactttcccagaagcttctccagctgagatatcctcccctcaccaatataacaatttcactaacactctcccacttctacccactctgtcatcataagcatccacatcccactctacccagtcagagctatgacttcttcttctagaacttgggacaccaccaattagagagtaaaatactttggatcttccaagtaacctgcaggatacttttttttctttttttttttttgagacggagtttcactctgttacccaggctggagtgcagtggcacgatctcaagtcactgcaacctccacctcccaggttcgagtaattctcctgcctcagcctcctcagtagctggaattacaggcacccacgaccacacccgactaatgttttgtatttttagtagagatggggtttcaccatgttggccaggctggtctcgaactcctgacctcaggtgatccacccaccttggcctcccaaagtgctgggattataggcgtgagccaccgtgcccagccacctgcaggatacttttaagttcacctcaagatcgtgcattaacaattttgtaaggtgcttagctcttgtctcactactaggaagaaaagagtgtccaatcttgcattatcaagccagccatgaaaattccatttaagggagatggtggggacaaagaagcatggatgagggtcagacagagttctgtggtaggaaagtgagaggctcccaggagctgaaggatgttagagatcaactgatgacatgaggatattagctaatgctgccaaggactctgtacagactcctcagcctcccaagtagctgggattacagacacatgccacggcacccagctaattttttttgtagcgtttcagaggggagtctctctatgttgcccatgctggtctcgaacttgtggcctcaagcaatcctcccatctcagcctcccaaagcactgggattataggtgtgagcaaccgtgcctagtctgaactgtgaatttttgaatgcaaaagctgactgagctacttgagccacagcccttagagagttacacataatatgcaaagaaggaatgcaacataagaaagggtattctacatcataacacttctttttttttttaaattttttgagacagagtttcgctcttgctgcccaggccagagtgcagtggtgccatcttggctcaccgcaacctccacctccggggttcaagcaattcccctgcctcagcctcccgagtagctgggattacaggcatgtgccaccacacccagctaattttgtatttttagtagagacgggatttctccatg[139 bp omitted]tgaagctacaaggtaagtcctaatcatcatgcaatcccctgtctaaagcatttttgttttaaaaaaggaaagagattggggagtgattacaaccttctacctttcaatgaagatcacctcaaatctgttaaaatagctggctcagtgtctctttttggccttgggaggagttgaaatctctggtcagggtgttgaagactggtcacaatgcagttgacatctccatgcctctggaaaatatgaaaccttgctcaaccctacccaagaaagggactttctgttctggcctccatagccagaaacgcctctgcctcccccagctgtggaaggaatacttgattcccaactcagggtcagctgcccttactctctgctcaattcctcttttttctctgaaacaaaatatttgggcatctttctcgataccctcctttccctaaatcacctccaacatccaatcaatcaccaactcctaagggttccatctttgaaactcattaaccttcttttctgcccccttttctccatccgcatgaccttaccctaggcaatacctccatcttctctcgcctgtaaaactgctctgagttccccaaccctgacccccagcctccctgtcagtatacttaacccctccaacatgcccaccacaattctggccacctttccaaatcccagctctgaattagagtctctctctctcccctctaaacagagaggctcaaagaccctcagctgaccctacaagaagtctgggatgctgccattctttcctggtaaatcccctcccatgatcccttactgtccacagggtgaacatctaattcttcagtctggcatctgaagcttctgaagcatctggaggtaagtatttcatccttaccttgctgagctgaactccacaggattcctgggctggagagaaggaaagaagagttaagtcccaagaggcgagtggaaaaggtgtcttcctctgcagctaagccaatagcaggctgtcttcatcccaccttctgaaggagggaaagggggcaaaaagttgagatctctgcttcctaggcgagcccgaggtcccagagaaccctgaaggtagagcaaacctcgtgttatcatggtgaataatattggcgtccatcccaggaaactgagctaatgctctctgcccagatgtgcacagggatgacacaccacgagcgatcttggtcccatcccacccctattctgctccaggcttcaggtagcacagtggttaaggacccagactctacagtgagagagaaatgggttcaaagctcccccagctcctctgctcaccgtctatgtgacctcgagcatgagacagagcctctttaagccccagtttcttcttctgcataataggtgtaaccctagctcctccctcctcgatgaaatgaggagacgctgaatgcagtggctcagcagagggtgaaatacagcaagcccacaggaaatggggctgcagtcatttgtctttgcacaactggtagtaggatggagagtggacgctcaaagataccaggtcctaacccttgcaacctgtaaatgttacgtcataaggaaacaaggtttttgcagatacaattaaggatcatgagatgaggaggtcatctagatgatgcgagtggacagtaaatgtcatcatgagtttcctcattaaagagtagagggagattggacacccacagaggagaaggcaatgtgaagagaagcagaaggtgacccggacacaagtcacagaatgccaccagccagcagaaacatgactgcagcagacccagggtcccacgcccagaaacctccagaacacctcaagggaattgtaaaccagcaagagatagctttacatttttttttttttttttttttgagacagggtctcactctgttgcccaggctggaatactgtggcatgatcatggctcacagcagcctcaaactcctgggcccaagcgattcgcccatctcagcctcttgagtagctgggaccacaggcatgtgccaccacatccaactaattttttgtatttttggtagagacagtttcaccatgttgcccaggctggtctcgaactcgtgagctcaagtgatccacttgcctcagcttcccaaaatgctgggattacagtagtaagcctctgtgcccaacctaggtagtgatatttatgattagccatgccataattataatatgatattatacctagggtttagcggacactatataaatgttagttgtaactaataatggttattttaacaatattattaatagacaaatttagttaccatttacatatacagacattagctaagtcctgatgatgccggtgaattgtctccacaactataaggtaatggctacctttatccccatttcacaggtgaggaaactaaggcaatagtggttaggacacccttccaaggttgccactgcgaggagctggtgacagaggggtttgaattcacttccatctgactcaagagcccaggatcgaactcaggacaaatgggtggtgccccagcgccagtgctgactgccagttcctgagcaggttcttcccctgcaggcccacccactggtcctcagtgcccctggtccctgccagtgaagtttgcagctcccagataagtagccccctctgggatccccactcagtcctggctccgtgacctctgaggggcccagagctggtacctgggaccttatgaccccaacacagtagccagcagtccctgtgagcaccacgctgatcaggacactcgaggcaatccctgcgatgcctccagcaggaatagtggtcctgagtaaggccggctgcagttcatccccaggaacctctgcaggaaagagagagagaaggagaaagagagagatagaaagagagagagggagggagaggaagagagaggtgtcagtgctggggctctgggtttcaggtcctcagagctgttccctccatgtgctcaattcgaaccctcctctccccccattttacagattgggaaactgaggcccagggaaaggaagcgtctgtaccagataataaatataacactcacagatgacaggaataatgtctggtaaactatattatctcatttattcctcaagacaaccctatgaggaaggcattgttaatatccccattaaagaaacaggcactgagaagttaaactacccatccaccatcacacatggggtagagttagaatttgaaacatgttgatgccagagcttacactctgaacctctgcactatgtggcctctgaggatcacattcatccattcctcattcaacgaacatttatttagcacatactgtgtgtgccagacacctttttaggcactcgagggatattgcagaaaacagaacagacaaaattcctgatgtcctagagcttacactttaggagggaactgagacataaaacacacaatgagggccagg[138 bp omitted]gtggcacgtgcctgtagtcccagctactcaagagactgaggcaagagaatcatttgaacccaggaggcggaggttgcagtgggtcaagattgtgccaccgcactccaccctgggcgacagagtgagactctgtcaacacacacacacacacacacacacacacacacacacacacacacaatggagcaaatatataaagtgatgacaagcattataaaggagtagaataagatgctattcgaggatctcacaggaggaccagacttagtctggggaaatcagggaacgcatcctggaggaagtgacatttaagctgagatccaaaagacaagtccaagatcagctggtagaggggttagtctcctgagcaaagtggccagcattcattcattcattcatttattcattcagcaagctgttctaggcactgatgatacagcagtcaacacaacagacaaggtctcaaccgtcacagatctggccacctggatggagagattgatgataaataattaggccctaataataattagggcctggcatggtggctcacacctgtaatcccagcactttgggtggccaaggccagtggatcacctgaggtcaggagttcaagaccagcctgaccaatatgacaaaaccccgtctctattaaaaaacatacagccaagttcagaaggaccacccaactgacctgcagacttacaagctgtaacaaattcttattgtcttgagccactgggtcttggcagggggggcattttatgcagctttgttgaggtactatatgattgacccaagccccagaacccacttatatcaggcaagagactctgagccattatcaccacggcatctcaacacccacctgagatccagatcttcccattgactgagctgcagaggtgagtgatgctgttggaggcctcacaggtgtacctgccctactggtccagagtgacctcagaaatgaccaggtgctgggtggcagggcctggccttctgtccatctcccagtggtactgggcaggggggtttgagtcagcaaagcaggacagggtgagggctgccccagctgtgacctctgggtctggagggttgaccataggagggtctgggccatctgcagagaattgagaagaccaggccagagggaagaggaaaggcctttgtccatattacaatgcattggccattgtctcagatgacactcttccatccccctccagtgcacaactgcatttgacactgttggccatctcccttctagttgctttcttgtcccctaccaccaccaccacctccccataccatattctctacttctactgtgcagctagaggtatccttttcaaagcttgttcaaacctgcgtcacatcatgtcccttctctgcacaaacccttctttggctgctgtctcatgcagggtaaaagccaaagccctcatcatggcccacaggccctgcacagtctgtcccattacctctcttggggcaagacagtcctcttcttcctcactctccttcttccctttacttcagccactatgacctcctctctcaaaaccacactcccaccccaggcttggcatttgcagtctcccttccacaaaatctccccttggtgccctctctcactttgtccaggacagacacttccagctttgccaacagaaccagctaaacttcagccgctccttcacccctcaaccacactcctatgcacatctccacccatcctttatcaggtcctggactcacatgtaactttgatgagagtggggttgctgatgctgctggtggctgagttccagctctcacactggtagacccccgtgtcattcctggtgatgttcgacagagtcagtgttctgcagtccagggacagctccctgtggccaccaatgaagagcttctggccattgacatcccggcggatggccacagtgctccttggaggaaggcaatgcagactgatggaatccacatgctccactggggctaagttactggctgtgacattgggctgaggaagtgtctctgcaggaaaattagaaagaggtagaaatgctgagtcctgcccagatcatgggcttagagaagaacacccttagggaacacccttagggctgaaggaattcagcacacttgccaatcatccatccatgcacctgtccataagtccatctactctccaccaactcagcctttcctacattcattcacccaattgttcactcttccagtcacccttctatttatccatccaccaatttgtccctcaatccacccatctatccatccgtcatccatccatccatccatccatccatccatccatcctatccataaatctaccttcccatctacctacccacccagggatgcatacatgcacccatcttctcaatcattcaccatttttttcacccatttgtccacccaatcatcttttccaatcacttaccacccacctaaattcgctcatccacctatcccttcatttacccaatcacctattcattcatcacccaatcacctattcattcatccaccaatccatccattgatcttcccttctgtctgtttacttaataaattaacacttctggagcaccaaatatgccccaggctttgtgctaaatgctttacagacacaatcttatatcctcatgcttatatttcaagagaagggtggattttaacccatttcacaggtgataaaactgagcaaacaataaaaagaaccttcatcaattgagtacttaatttgtcgtagatgttttatgtgtgtgattcattagacttcacaacaaccctgtaaatccccatttgcaaaatgaagaacctgaggctcagggatgatccatgactaacccaagatgaggacattgatccatgggggcaaatgggattcatgctgcccatctgcctgcctctttcctttctcgctgacctgcattacacccagggtgatctcccacacagctgagttgtaccctctgtagctcctacgaatcacctggatgttgagatgcactgtgctataacatccttttattctcctaagtcataatcacaccatacaaataagaaaaggatctcagaagggtaaccattgaaagcaaaaattttcatccctaaataacttttataccaatatttttaaaaatttggagcaagatagcacaactcttctttataaaggaaaatacatatgcagtaatttataagaaatagatactggaggccaggcactgtggctcgtacctgtaatcccagcactttgggaagccaaggcaggcggatcacctgaggtcaggagttcgagaccagcctggccaacatggcaaaaccccgtctctactaaaaacacaaaaattagccagatgtgctggtgcacgcctgttatcccaggcggctgaggcagaagaatcacttgaacccaggaggcagaggttgcagtgagccaagatcatgccattgcactccagcctgggtgacggagtgagactttgtcttaaaaaaaaaaaaaaaaaaaaaaaaaagagagagagaagaaaaaaaaaaagaaataggtactgggaatgaacctgtaagagggtataacaaaatattagcagtggtcatttctgagaatgtagagtttttacccttttcctttttaaaaatatttgtattggtaatttctcttacactggatatacagtatgtattcaataaagaaataatcagaatgtaggatgtaatgtggctctatattaattaacagaaagacattaaagattaaaagatgaaatttaaaaacagtttaaacaataataagtatagtctaatactatttgttgtttaaaaatacatatatttggccggccacaatggctcacacctgtaatcctagcacttttggaggccaaggtggacggatcacttaagcccaagagtttgagaccagactgggcagcacagcaagaccctgtctctacaaaaaggacaaaaattagcccagcgtggtggcatgtgcctgtagtgccagctacttgggaggctgaggtgggaggatcaattgatcccaggaggttgaggctacagtgagcaaagatcaaaccactgcactccagcctggcagacagagtgagaccctgtctcaaaaaaaaaaaaaaaaaagaagaccacacacatatatttgaatgtatatacaaaaacagaggaattatagaagccctgtggctttttctgggaggcttattgtggaaaacattttttgccttcttgcccatctatatgatttactttttctacaattattgtgaaatttatttaaaatgtgaaaaaggtggcatataatattttttttttttttttttttttttttttttttaagtttccttgtattttgaattctttttttttttttttttttttttttttttttttttattatactctaagttttagggtacatgtgcacattgtgcaggttagttacatatgtatacatgtgccatgctggtgcactgcacccactaatgtgtcatctagcattaggtatatctcccaatgctatccctcccccctcccccgaccccaccacagtccccagagtgtgatattccccttcctgggtccatgtgatctcattgttcaattcccacctatgagtgagaatatgcggtgtttggttttttgttcttgcgatagtttactgagaatgatggtttccaatttcatccatgtccctacaaaggatatgaactcatcattttttatggctgcatagtattccatggtgtatatgtgccacattttcttaatccagtctatcattgttggacatttgggttggttccaagtctttgctattgtgaatagtgccgcaataaacatacgtgtgcatgtgtctttatagcagcatgatttatactcatttgggtatatacccagtaatgggatggctgggtcaaatggtatttctagttctagatccctgaggaatcgggtggcatataatatttttaaagcaatcctatcaatgaaaagtcattttgttggttaaagaatgtaaaaatttattctgcataacacaggttagaaaaatcttgctgaatatataaagaagtgaaacagcaaagaaaagaattctaaaaaacaaaaccaaacccaaattcgccaatgaagtcctggggcagagaagaatttttctcttatttttttctttttcttttttttttctttgattttgaagatttcaccattaaccaatcaccctcaaccctggcttcatacctgagacagtgatgatggtgtccatactgctgtgcaagccggaaagggagttggaggccttgcaggtgtagacccctgagtgtgccctggagagactgggcatgaagagggtctggccctcccatgtggtgaccccactgaagctccatgtgtactgggcaaggaggtgggagtaggctaagcagaccagagtgaggttggaaccaatcacaaaatctgggtccagtgcggtcatgatgggggtatccgggccatctgaacaaggagaaagacttcctaattaggaagagtatgagaagtaaggaccacccccctagattgtgcatttcagctcagtgttggaagcctgacatgttgagggaggcacacagcaccacaacgtaaaagtttgtcagaggaaggaagggagggaggggaggaagggagggagggagggagggagggaggaaggaaggaaggaaggaaggaaggaaggaaggaaggaaggaaggaaggagggaaagaacaaacgaaccatggctggcggtagcctccctcttgtgtctattaccctccttgatctttgaagactgtcagctccatgaggacagggatatgcttgtcagttatgttaactgctttgactagaaataacacccaatacacacagcacacagtggatgctcagtagatgctttcccaaaagtagagagacagaggggcagagagagaaaaacacatgggttcaagttcttatctttcttcttgaccacggtgagatcttgggtgagcccttcccctttcttaatctcagttttcttgtttgtaaaatgtggtgtctctgaaagtccttccagttctgcaaatatttatgttgtcgagtctggaatttctgggatcttggcttcctacaatctccatctacctttgtacctgagattgaatgggtctgaaagtccttaattgggtacatagtagaagctcaatacatgccccttaaataaataaatgatgataaacttctgagagaatagtcattgtaaacgtctattaagcacttagtgtgcagagtagtggaaaagaataaagaaaaaaagagaaaaaaagaagcacttgctatgttccaggcactattctaagttccttaaatgaactaactcacttaatcctcataatcacccaatgagatagataatattatgattctcactttgcagatgagaaaactgaggacatagaaaagtgaagtgacttgcccaaggacacctagctaagaaatagcagggacggctgggcgcagaggctcacgcctgtaattctagcactttgggaggctgaggcaggaggattgcttgagcttaggagttcaagactaggctgggcaacatagtgagactttgtctctaccaaaacttgtaaaaattagccaggcatagaggcatgtgcctgcgatcccagctactccggtggctgaggcaggaggattgcttgagcccagaagggcaaggctgcagtgagctatgatccagccactgcactccagcctggacaacagagtgagaccatgactcaataaataaataaataaaagaaacagaagcactaggatttgaaccaaggcagtctgtagagtctctgatttaaacgctaagctataaatcatggatgaaccagtagatagttgggctggaggttctgtgtggatcagaggtgagtcagagcaaagaaacccagacttacaagccacgccaaccacgagggcttcactgagcctggatcccaggtggttcctggcctcacagtggtaggtgctggagtcattgcgtgtgactgtggggatggtgaggaccctgccatctctggagattactggtccatccccttcctgaatcacctcaaggttcagaaaccactggaatgtcctgtcattgtttggagaaatgcatgtcaaattcaaggagtctgtgtgctccagaggggccaagttctgggcttccaccgggggctggtgcagcttctctggggagaaggaaagagaaagaatggcgttataggacatgggaggatctggaaccctaggaatgatcagcagcacgaataggctggggaccttggaaacaccagcgttggctttgctgtttccaagatgaccaataagcacacacacacacacacacacacacacacacacagccaacagctctacttccggaagttcttaactgtctagagatcccagatcctctccccagaaatacacccaataacacacacaccacacaaatacctacacatttgtatataatttcaaggggttatggggcactctaaagaccaactttagatttcaagtgaggaatcttatacctagattacaaattagtaaatatctttcttttttgagacagggtcttgttctgttgcccaggcttcagtgcagtggcactaacacggctcaccatagtctcaacctcccaggcacaagcgatcctcccgcctcagcctcctgagtagctgagatccatgcatgtcaccatcctcagctacttttgaaaaacttttgtagggtggggtcttgctgtgctgcccaggctggtctcaaactcctgggctcaagtgatcctcctgtcttgacctcccaaagtgctggcctgacaggaagtaaatatctttcttgaagtcaacttagaaatacaagttgaaagttacacatgtttatataacttttgacccaatgattacacttttaaaaacagttttattgaggtataataagcaaataaaaatgttgtatgttcaaagtgtacaacttgatgttttgatagttgatctctacaatcaagctaattaatatatccatcaccggctgggtgtggtggctcaggcctgtaatcccagctctttgggaggctgaggaaggtggatcacctgaggtcaggagtttgagaccagcttggccaacatggtgaaaccccgtctctactaaaaaatacaaaaattagccaggtgtggtggcacgcacttgtaattccagctacttgggaggctgaggtgggaggatctcttgaacctggatggtgggggttgcagtgagccgagatcataccacgacactccagcatggacaacagagtgagactccatctcaaaaaaatgaaaaaaaaaaaaaggaagaaaggaaaaaaaactgctggatgcttgcttgcattgcttccattgcttgcactgcaagcattatctcatgtactactggtaccaccctgtgctgtaaggactattaatatcccattttacaacaggtaaactgaggtttatgttgggtaagtgagttgtgaaaaaccaagttgtaagtgggtgaatcatttttaaactcagggctatgtgactccaaacttcataaccactgtgaaataaatactatgtagaaaaatctatttttaaaaaatctcagaaaatgaagcaggcacagttttccctattccatcccgagcacagttaaaaaccttggatattatcacttctacactgctggtgggaatgtaaactagtacagccgttatgaaaaacagtgtggagattccttaaacaactaaaagtagaactaccatttgatccagcagtcccactactgggtatctacccagaggaaaagaagtcattacacaaaaaagatactcgcacacgcatgtttatagcagcacaattcacaattgcaaaatcgtggcaccaacccaaatacccatcaatcaacaagtggataaagaaactgtgatatatatatatatgttcatatatacgttcatatatatatgttcatatatacgttcatatatacgttcatatatacgttcatatatatacgttcatatatgcgttcatatatgcgttcatatatatacgttcatatatgcgttcatatatatacgttcatatatgcgttcatatatatacgttcatatatacgttcatatatatacgttcatatatgcgtttatatatacgttcatatatgcgttcatatatatgcgttcatatatatgcgttcatatatacgcgttcatatatacgttcatatatacgcgttcatatatacgcgttcatatatacgcgttcatatatacgcgttcatatatacgttcatatatacgcgttcatatatacgttcatatatatacgttcatatatacgttcatatatatacgttcatatatatacgttcatatatatacgttcatatatatacgttcatatatacgttcatatatacacgttcatatatacgttcatatatacgttcatatatacgttcatatatacgttcatatatacattcatatatatgttcatatatacgttcatatatatgttcatatatatatatatatatatatatatatatatgaatgatggaatactactcggtcataaaaaggaatgaattaacaacatttgcaatgacctggatgagactggagactattattctaagtgaagtaactcaggaatggaaaaccaaacatcatatgttctcactgatatgtgggagctaagctatgaggacacaaaagcgtaagaatgatacaatggactttggggacttggggtgaagagtgggaggggagtgagggatgaaagactacaaatagggtggagtgtataccgctcaggtgatgggtgcaccaaaatctcacaaatcacccccaaagaacttactcatgtaaccaaaccgacctgtaccccaataatctatggaaaaataaataaaataaaataaagcaatagagaaaaagcctcaaaaatatgaacagaacatcattgttctatgggaataatatcaagcagtctatcacaggtgcagctaaagaatgaataaataaataaataaataaataaataaataaataaataaaaatagatgactcggaaaggaggagagaatatggcagactggctgcggatctcaagaccggagaaagcacatggtggtgagttttctggactttctttgcgcctcacagatcccagactgggagctggagagcctggcaatctagaaatgccaatgagtgtagatccaaaagaggctcaagcaaagcctgctctagccaaaggacaaggagcagtagcctgacaagatttgctaaagacagcaaatctttacaagataatcactttgctgctgtgatatcccacagaaaagcctggacatttacccttgccagctgtacagagacacccatcccctccaccaggctgaataagcagctgggactgtcatccttgcccagcagtaatgagcaccgaccctgcagtgtccattgaggccactagggagcggtaacgaggcgtctctgccccttctgggcaagatggtatcagaggatgtctcagtggaaagcctgaactctgctaactgcccagagtaacagttgccccgccccacctggaatgtcaacagaggccaaatggggaacctggacctccatccccactggctataacaagatggtgccctttttgccccaccagcaagatgtcagaggagacctgctataacagaagatttaaatgagatccagcgtctcataatttccaaaatgtccagggtgttgttgaaaatcacttgtcatacacctacatgtaatcccaatactttgggaggccgaggtgggagaattgcttgagctcagaagttcgagaccagcgtgggcaacatagtgagaccccatctctacaaaaaaaaaaaaaaaattgactgaatgagaaagacattcctgaaattaaatgaggaaagacaattaatagagatgacatggattgttgttgatgttttctaacttggtcttgagttttctaggggatttagttgtagatgtttaaagtgtaattttcactggttacttctttatcttggtggtcggcctaatgcctacatgtctgacctgtgaccaggtgtccctctcacagtacacttattttttgtgtgtttgtttgtttttgagacagagtctcactctgtcacccaggtcggagcgcagtggtatggtcttggctcactgcaacctccacctcccaggttcaagcaattctcatgcctcagcctcctgagtaggtgggattacagacatatgccactacacccaactaatttttttttttttttaagtacagacggggtttcaccatgttggccaggctgatcttgaactcctagcctcatgggatcctcccaccccaacctcccatagtgctgggatcacaggcatgagccatcacacctggccacagtacacttgtttataatggcagacattcttaaggcttttgtctgacctgtgtccagtttatttctacaaagagagccatgctttaggacagccctgaccaggaaagacgttaggtttggatgtgtcagtcaggtgagacacagaggaggcagcacaacaaaacacatgaaataacaggggcagtttattactcacagattccggagaagacagagcagcacatctcacagagccaacaggaagaagagagttgtcgggacacgcacactcaaccagcgggtggggagcaagaaagagaaagtgagagacctgtgggctgatgcttttattggagtctaaggaaactgctcaggcagttttccacagagaattctaactgggtttagagccagcaggcacaagttgcatggagtcacactgactgggaggtgatcactgtggcatatctgcacagcctatgcagggtctgggggtcagggggacagtcaggtgagttatatctagctgttgcataaggaggtggttaacaggaagtggtagtgtaaggcaggtatctggatctgccacattaaggatctggggggaggcggagacctggaaactgtgtcaagggtgactaagcttttcttatggtatgagaaagtccaacttatattcaaaatagatactgagccaggcacagtggctcacatctgtaatcccaacactttgggaggctgaggcaagaggattgcttgagctcaggagtttgagaccagcctgggcaacacagtgagacctccgtctctacaaataaaatttcaaaaaattagctgggtgtggtggcatacgcctatagtcccagctacttgggggactgagatgagaggttcacttgagcccaggagctcgaggctgcagtgagccgtgattgcaccactgcactccagcctgggtgacagagtgcgaccctgtctcaaaacaataacatttcaaaaattgatactgagtttctataaaattgtaagaattcactacactgatgttagaattgtcttaaaagaatcttagagcagccaacataaaaatgcttcaatgaacaattacaaacacttgaaataagtgaaaaaccagaaagtctcagcaaagaaatagaagatatgaaaaagaacaagacggaaattttagaatggaaaagcacaataacagaaattttttaaaaacttaatgtttgagcccagctgcagaatggagatgacagagataaaaatcagtgcagataaaagttaccaaatctgaacaacagaaagaaaatagactgataagaagtgaagaacagaactttgggacctgtgggactttaacaaaagagccaacattcatgtcattggagacccagaaggaaaggaggaagtgggtataatggctggtttcccaaatctggtaaaagacatacatctatggaatcaagaaactgagtaaaccccaatgccagcgtggtaatcaggattctaaatatagtccttccagatttctgttcctgattgttcaatcaaatgctaatctaggtattgctttgaagggattttgtaattaaagctcaaagtcagctgatcttaaaatacagatcatctgggtgggcctgacctgatcaggtgactcttttaaaagcagatcagatgagaaagtcagagaatcaaaacacaaggaggattcaatgcatccttgctgtctttgaagatgcaggggtcaatgtgtgagcagggtagagtggcctgcaagagcttagagcacccgcagatgacagccagcaaggaaacagacctc[298 bp omitted]ctgaatgagcttggatatgggttctttcccaaagcctacaggtaaaccccagccaactcacatcacaccttgattttgacctggtgagagaacccagttgaggacacttggacatcgaggtacagaaactgaaatagtaaatgttattcactctcttagttcacccagaatcagactctgcactagaatgtaagtgcaattagtttattatttatttatttacttttttggagatggagtctcgcactgtcgcctgccaccacgccaggctaattttttgtatttttagtagagacagggtttcacca[137 bp omitted]ggaaagtaagtaagggaaaagaaggaagccatatagaaaaattagctctatagaaaactggagctcacctctgaaaactggtacaaaacacacctctgagggccgggcgcagtggctcacgcctgtaatctcagcactttaggaggctgaggcaggcagatcacctgaggtcgggagtttgagaccagcctgaccaacatggagaaaccccctctctactaaaaatacaaaattagcccggcgtgctgtcacatgcctgtaatcccagctactcaggaggctgaggtgggagaatcacttgaacctgggaggcggaggttgcggtgagccaagatcgtgccattgcattccaacttgggcaacaagaacgaaactccatctcaaaacaaaacaacaacaacaaaaaataaaaccacctctgagttgttccccctaagttcaggggaatatatctaccaattccttcttggtgttagttaatggtcactcccaggatgttaatttctctgacattttcagcctgccctcagttggggcttgcatcctcttgtactcagagaaatcagagaggcacagacactcatggaaggggttgcggaagtactcaccactctctttcagtcatttcgagaatttctcttctttcatcattcagtcgtcctaaaagtcctgtgtgtcaataataaattacacccactgaaaggaagacgtatatttacatttcatggcctttcattttctattagtgtccccttcattccactccatcttattattagaatgattctaccagtgtctttctggaaaataggtgtaggaataaatttattctaaaaaataaaacaacatctacgcaaagaggtcttaaaaccttcataattagctctataaaacaattaactccaagaagtaatgctgaatgctttccaaatgcatactgacagtaagaaaacattatcaaatacccacatttgcattttttctagacatggttacagacctaaatccctcagttgatcagcttgagggaccaaataaatctctgttatcggtatagcaacagcacttacttgttttgtagcagtcagggcataccaaagtaagatcaaagaaaaaatagaatctcacgaaatatattttctcaaggtaaaccctcaccaaattataattgaatgattagtctggtataattttagtagaaaaattataggaaaaaaaagacaggacaaaatatgataattgagttggcaaagatcaactcctaagcagctaatttagtgttcaataaaacccaaaaatgcagaagcatgattttcccatttatagtatgttcacatactataaatgagttattttaaccaatttagaagtaagacctggccaggcatggtggcttacacctgtaatcccatcactttgggcggcaagacaggtggattgcttgaggccaggagttcgagaccagcctggccgacatggccaaaccccgtctcttactaaaaatatcaaaattagctgggcggggtggtgcatacctgtaatttcacctcctcagaaggctgaagcatgaaaatcatttgagcctggaggcagaggttgcagtgagctgagattgcaccactgcactccag[132 bp omitted]ccagcctggccaatatagtgaaacccgtctctactaaaaataaaaaaatcagtcaggcatggtggtgtgtgcctgtaatcccagctactcagtaggctgaggcaagaaaattgcttgaacccgggaggcggaggttgtagtgagcagagatcctgccactgcactccagcctgagcgacagagcaagactctatctcaaaaaaaaaaaaggaagtgagacataagtattgtattgtatcatgataaagcaattatttggcattacaccttaatgaattttatccagtcaatttgcctttgtagacacagagtgattcatgtaatatgatatgtagcataatcaagtttaatctctgtaataatggttgtttatctgtaggctatagttgtaaaagaagaataaataaataaagcaatctatcaatcttgatcaaacaatgtagcccacagttgattcagatgttacaataatgtagttggtacaactcactgggcagcatataccatgagcactaatgaaaaataaaaatcatggcaaggcgcgatggctcatgcctgtaatcccagcacattgagaggcagaggtgggcggatcacctgaggtcaggagttcgagaccaagctggccaacatggcgaaatcccatctctactaaaaaatacaaaaattagccaggcacagtggctcatgcctgtaatcccagctacaggggaggctgaggcagaagagtcgcttgaacccaggaggcaaaggctgcagtgagccgagatcatgccactgcactccagcctgggcagtagattgagactctgtctcaaaaaaaaaaatgaaaaatgaaaaatgaaaagcaactgcatgaaagtcaattcagtttatgcctagccttcattaaagaccaacaagaaaaaataacaaaaaaaaacaaaaaataaatgtttcagtgaaaatctcatttgggctctcatctacaggacagagtgtagatggaaaatacatgtttgatgtaataactgatcttgtgatatacctttatgattgtaaatagttgatatattaagaaataatagtaaaataaatgttattttaagcctccaaatttgtgataattttgttaggcagcaataaataataaaaaaaaaaactaatacacccaaacagaataaacccaaatgaatctatgccagggcatatcataatcaaactgttgaaagctaaagatgaatttaaaatcttgaaagcagtgaaagacaaatgataccttacccataggaagaaaacaatttcaatgaaagtagatttctcatcagaaactatgaaagccagaagaaagaagcataacattttataagttctaaagaactgtcaacccaggattctataaccagcgaatgaaaaagatgtacatttatatgtatacatataaaatatgtatatatgtatataaatgtatatacatttataggtatacatataaaatatgtatatatgtatataaatgtatatacatttataggtatacatataaaatatgtatatatgtatataaatgtatatacatttataggtatacatataaaatatgtatatatgtatataaatgtatatacaattatatgtatatattatgtatataaccattcaagaatgagagagatgtacattttaaaataattaaaagaggccgggtggggtgactcactcctataatcccagcactttgagaggctgaggcggacagatcacttgcggtcaggagttcgagaccagcctggccaacatggcaaaaccccatctctactaaaaacacaaaaattaggcaggcttggaggctgaggcaggagaattgcctgaacccaggaggcggaagtgcagtgagccaagattgcgccactgcactccagcctgggtaacagagcaagactccatctcaaaaaataaataaaataaaataaaataactaaaagagttattgaattgtaattgcatttggattggaaattggatctaattgtaaattggatccaagagtaactggattgtttgtaatacaaatgataaatgcttaagggaatgagcaccccgttctctatgatgtgattattccacattgcatgcctgtatcgaaacatctcatgtaccccataaatatatacacctactatgtacccataaaaattaaaataaacaaatttttaaaaataaaataaaaaagaattcaggaaaaaccaacacattctcagatgaaggaaaactaagagaatttgttgccagcagacctaccctaaaagaatagagaaagggagttattaaaacagaaaagaatggtaaaagaagggaatctggaacatcaggagaaaagaaagatagagaaggaagaaaagaaaaggagaaagagggagggaggagaggacagaaaaaggggagaggggagaggaaggggttttctttttcttcttgagttttctttccctttttttccagaggatcttcacacctctaactgaattttctaaattacatttaatagttaaagtaaaaattgtaacactgtctgatgtgattctcaatgtatgtaaagaaaatattaagacaataatattataaatgattataaatgggagaagataatggtattaaagggaggtaaggttttttttgtttttttttttttttaactgtgtcttgttctgttgcccaggctggagtgcagtggcacgatctcagctcactacaacctctgcttcccgggttcaagagattctcgtgcctc[134 bp omitted]tcgatctcccaatgtgctgggattacacgtgtgagccactgtgctgggcctggccctgaggtaaggcttctatattttgtttgaactggtaaaacgtcaaaaccaataggctgtgataaactctatacataatacctacagccattgctaagaagtctatacaaagagacacactcaaaaacattacagataaataaagtgagattctaaaaaaatattgatgtgacccataagtaggcaagaaaaaggaaacagaaaaacaaaaaaccaaaaaacaaacagaagacaaaaaaaatgaattggcagacctaagtcctaacataacaataattacattaaatttaatagcctaaatataccaattaatggatttatatttacagactgtattttttaaatgagccagttaaatgatagccacaacaaaattacttcaaatattatcatacacacaggttgaaaaggattaaaaaaaagatatactatgtcaatattaataaaaggaaagcaagaatggttatagtagcatcagataaagaacagagcaaagataattagcagggacggaaaggaacataatgatagtagagtcgctccaccaaaaagatgtggcaatctcaaatgtgtacacaccaaacaacggaactacagaatatgcgaaggaaaaatggacagaactgaaatgagaaacgcataaactgacaattacagtttgggacatcagcactactctcaactattgttagaacaactagacaaaaaaaaaaatcagcaaggatagaagaattcaacaccaccagcaatcaaggtctaattgacattgacaggacatttaatccaacaacagcgaaatacacattctttccaaacattcacagaacatatactaaaataaaccatgtcctgggctagagaacctcaacaaacttgaaagaattgaaaccatacagggtgttctctgaccacagtggaatccaactagaaataactaacaggaagataagaacaaaatctccagatacttggaagctgaacactacacttttaactaagccacaggtcaaagaaaaagtcttgggggaaaacaaaaatacattgaactgaatgaaaaagaaaacacaacacatcaaattttgtaggatggaactaaagcggtgcttcgagagaagtttatagcacaaaaatgcttacagtagacaagagggaaagtatcaaattggtcatctaagctcccaactcaagatattagggaaaaaaaaaaaaaagaaacccaaatcaaacagaagaaataaaatagcaaatggcaaaaatcaataaaattgaatagagaaaaccaacaaagcaaaaagttggttctggccagtcacggtggctcacacctgtagtcccagctagtcgggaggccgaggcaggaggatcacttaagcctgggaaactgaggctgcagtgagcagtgattgcaccactgcactccagcctgggtaacagagtaagatcccctccccctaaaaaagatggttcttacaaacaatcaaaattgatgaacctctagcattattgagaaagaaaataatgaaattacttatcaccaatttatcagaaaattaatcaccagtgtcaggaaagaaacagtggatatcattacaagccttgctgacaacaaaatgataataaaggattgaaacaaaacagctctacacacataaatctgataatttacataaaaagaactaattcctcaaaaaagcaaaaactactgtgtccggacttggtgggttcttggtctcactgacttcaagaatgtagccgtggaccctcgaggtgagtgtttcggctcttaaggtggcgtgtctggagtctgtcccttctgatgttcagatgtgttcggagtttcttccttctggtgggttcctggtctcgctggctcaggagtaaagctgcagaccttcgcagtgagtgttacagctcttaaggcagcgcgtctggagttgttcgttcctctcggtgggctcgtggtctggcttggctcaggagtgaagctgcagatcttcgcagtgagtgttacagctcataaaagcagcgtagacccagagagtgagcagtagcaagatttattgcaaagagcgaaagaacaaaacttccacagcgtggaagaggacccgagcgggttgcctatgctggttcaggcagcctgcttttattctcttatctggccccacccacctcctgctgattggtagaaccgagtggcctgttttgtcagggcgctgattggtgcgtttacaatccctgagctagatacaaaggttctccacgtccccatcagattagttagatacagagtttccacacacaggttctccaaggccccaccagagcagctagatacagagtgtcaattggtgcactcacaaaccttgagctaaacacaggatgctgattggtgtatttacaatccctgagctagatataaagactctccacgtccccaccagactcaggagcccagctgtcttcacctagtggatctcgcaccggggctgcaggtggagctgcctgccagtcctgcgccgtgcgctcgcattcctcagcccttgggtggtcgatgggactgggcgccgtggagcagggggtggcgctcctcagggaggctcaggcacggcgggctgtaggtcccgagccctgccccgtgggaaggcagccaaggcccggagagaaatcgagcgcagcgccggtgggccagcactgctgggggactcagtacaccctccgcagccactggcccgggtgctaagtcccccattgcccggggccagcagggctggctggctgctccgagtgcggggcccaccaagcccacgcccatccggaactccagctggcccgcaagtgccgcacacagccccggttcccgctcgtgtctctccctccacacctccctgcaagctgagggagtgggctccggccttggccagcccagaaaggggctcccaccctgcggtgggggactgaagggctcctcaaatgccaccaaagtgggagcccaggcaggggaggtgccgagagcaagcgagggctctgaggactgccagcacgctgtcacctctcactaccaccactaacccaatatgaaatagagaatttgaataaccctacaactattaaggaaactggtttttaaattttaaaactcctgaaaaggaaatctccaggcctcaatagtttcacatgagaactaccacttgatccagcaatcccactactgggtatctaccaagaggaaaagaagtcattatacaaagaagacacttgcacacacatgtttatagcagcacaattcccaattgcaaaaatgtggaaccaacccaaatactcatcaatcaatgagtagataaggaaactgtggtatatatatatatatatatatatatgtatatatatgtatatatatatgtatatatatacgtgtatatatatatatatatatgatggaataatacagagtcataaaaaatgaattaatggcattcacagcaacctgggtgggattgaagactattattctaagtgaaataactcaggaatggaaaaccaaacatcgtatgtcctcattgatatgtgggaactaagctatgaggatgcaaaggcataagaatgatacaatggactttggggactcaggtgggggaaaggtaggaagcggatgagggataaaatactacaaagtgggttcagtatatactgctccggtaatgagtccaccaaaatctcacaaatcaccactaaagaacttatactacctattccccaaaaacctatggaaataaaaaaagataagaaaaaaaagtaaatgtgaaaatataagctacagactaggagaaaatatttgcaaatcataaatctaataaaggacacctatctagactatacaaataactctcaaaactcaacagtaaaaacaaaaccaaacaacaatctatatttttcagtgaaatctctcttcacggtaccgcacagtcatgattactgtagctatataataaatttggaaatcagggagagtgctacctcctactttattctttttttttcagaattgttttagttattcagttcttttcctttgcacacaatcttctcttcatcgaagagcgatttcactgaaaaagatacacaaatggcagataggcacaggaaaagatatttaatcaacatcattagccattagggaaaagcaaagtaagaccacgataaaacattaactacatacctattacaacgactaaacttgaaaacaatcacagcgacgatatgaaacactgccaaggatgcagggacactgcatctcccacaccttgctgatggagatgtaaaatggtgcagccacttgggaaaatagtttggcaatttctttaaaacactaaacagatacttagcatatgactcagccattgcacccctgagcattatcccaaagaaatagaaactcaagccaggcacggtggctcacgcctgaaatcccagcactttgggaggccgaggcagcagatcacctgaggtcaggagttcaagaccagcctggccaacatgacaaaaccctgtctctactaaaaatacaaaaaattagccaggcatagtcgcaggtgcctgtaatgtcagctactcaggagactgaggcaggagaatcagttgaatccgggaggcggaggttgcagtgagtagagatcgcaccactgcactccagcttgggtgactgagtgagactctgtttcaaaaaaaaaaaaaaaaaaaaaacagatccacacaaaatcctataggtgaatgtttatagtagctttatttgtaatacccaaaaaacaaaaacagccaagttgtctttcaataactgaatgattaaacaaactatagtacgtggaaaagtgttcagtaataaaaaggaacgaactattgatatataactacatttgacccttgaacaacttgggctttaactgtgcaagtccacttataagcagattttcttctgtctctaccacccctgaaacaacaaaactaacccctcctcttcctccttttcctctgcatgaaaacaacggggatgaagaccttcataatgatccacttccacctaatgaatagtaaacatatgttctctttcttatgagtttaatacatttttctagcttactttattgtaagaatacagtatataatacacagaacatgcaaaatatggctttcattcaacaataagctattagtaattaaattttgggggactcaaaaattaatttcaactgggcggagttcagcacccctaatccccgcattgtgcaagtgccaactgtatttgaatggatttcaagggcattatgcatgagtaaaatattgaagtcgctcgcaaaaggtcacatactgtacaatcccatttatataacatccttgaaatgacaaaattatagagatggaaaacaacttggtggctgacaggggttagggatgggggaaaagagggaagtgggcgtgactatgaaaaggtggcaccagggagaactttgtggcaataaaaccgttttgtaacttgattgcagtggcgtttacatgatcatgtgatcaattgaaactacacacacacacattgcaccagtatcattcctgattgtgatgttgaactatagttatataagatgtattcattgggggaaactggatgaaaggcacatgggatctctccatgatacaatttctttgcagcttcctgtgaatctataattacttcaaattttaaaaagaaaagcaaaattaaagattttacaaattaaatctgaaaggaaattaagtgttaataattgcctctttgggaggtggaagtacatgaaatttttctgttttgcatgcaagtattttctataatgaacatatatgttactttgtttttatcacagtaatttaaaaaaaaaaatcttcctcaaaccatggtcatgagaggtctactcagctgcttacatgttcccctccagtgacggcacaggggatggcctctcctaaaacaaccctaggaggatggcctcacagatgagggaagtggggagagcagagcatctcctggctagggacctctgagttatgcagcaagcatcaaccatttgcaacaaaaaaaaccatgagaaacatacacttattcacaatgctggtaggaatgcaaaattgtatcattgcaatgcagtggggatggggaatatctaacaatttatgtatggatctgcttttcaaaccagttaccctatttctagggagttcacctgaagaagcacctctggcaatatgaaaacacatgtccacgaagttattcattacaacactgtttatcactgcagaatattggaaaccacctacatgcccaagcataggagagtagctgaatgaattatggtacctctacacaatggaatgctgctgtaacaaaagaatgaggaagatctccatggcctgataagaagtgctttgcaggacattctgtcaagcgaaaaaagcaaattgcagaagagcatatagagtatgctatcggttgtgtaagaaggaatgatgaaacatacacatagctatttatctttacacacacacacgaaggataaaccaggaagaaatgaagttggttacccgtaagaggtgagaggaaaataaggtggaaggaatataggagggagtgacccttctctgaaatgtctttataacgaggtttgacttttgaaagcacgttaatattctaaatgttcaaaaaataaaattaaacaggaaaacaaactaaagcaaattaacctaattgtatttcaaatgaatattataattatactgaaggggaaggaaagaaggaaggaaggaaatgtgagagggagggaaacagggaaggagggggtaataaatgaaaggactaactctagtaatttacgtatattttactatatacccatagtctttaacagggttggaggatgggaactgcaaacaaatcctgaattcattttagtagaactgttttttgtagtggtatggctgatgcaattgtaagactatgttaaatatattatactgttataatgtatatagatatatcaaattattatattaagcaaatgagtaaatgtgttaatgttgggagccagtattctcactgtggaagaagggacatgcaaatgggaaaagcaaaaaagaacctggaattaggagtggtggtgtaaatgcatgatttctaaaatatgcataattatgtgcatatatgggcatatgtgtatgtctgtgtgtacacatgcacacatttttctagttctatccactgaaagagcctaaaagcaaagacacacaagtagcacctagctcctagatctttggtctctaataccattccatgctaaaaggaagcagtgctctccagagaaatgacttattcccggagaggagcagaatatgtacaacgtgagccctgaatatcttattatgccagacacagagtgtttttaaaaaatcagcatgtcccaagggagatgaaaagggctcccactagtcaacttcagaataatttaagcacccaaatattaagtacagtaacaagttataaaccatcagaaaatagaaattaatgagtccttactgataatagataataggtagatgatagatagataataggtagatgatgatagatagttttaatttttaaatggggaagtatattcttt[137 bp omitted]tatagcgagaccacatgtcaatgaaaaataaaattttggctgggcacggtggctcatgcctgtaatcccaacactttgggaggctgaggcaggtggatcacctgaggtcgggagttcaagaccggcctggccaatgtggcaaaaccccgtctctactaaaactacaaaaattagctggacatggtggtgggcacccgcaatcccagctactcaggaggcttaggcaggagaatctcttgaacccaggaggcagaggttgcagtgagccaagatagcaccactacactccagcctgggtgacagagcgagactccatctcaaaaaaaaaaaattatttgaaaaaagaaaacttttacaaattagatgagtgtagtggtgcatgcctgtggtcccagctactcaggaggctgaggcaggaggatctcttgagctcagaagttggaggctgcaatgtgctgtgatcgcaccactgcactccagcccagctgacagagcaagaccctatctctaaattttaaaaaaaaattaaaaagatgaattttaaacaagaaagactgtgggaaagtttcagattaaaagagagtaaagaggacacaaaatccagtatctgactagagactggatcctgtactggatgggggaataggctataaaggattttattgtgccaattgacaaagttggaatatggatgatagagcacataaaagtattttatccctggacatttatgaaggtgataactgtgggtatgtaagagaatatctctgttcttaggaaatacatactgatgtatttaggggtaaagagccatgaagtttgtaatttactatcaaatggagggaaggaaggagagagggagggggagacagaagggggagagagagcacaaatgataaagtaaatgagaacaaatattaacactaggtgaatctgaataaagggcatacgggtgttctttgtactctttatttttgcaacttttttaaatttgaaattatttccaaataaactgtttcaaaatgttattatagaaaaaacaaagtagccctcagaaaatgtttttcccctaaactcccatcaaccacttgggagtgctcacttcccacacccttggcaacattgattagaatcacacttgaaaagttttaacaggcttatgagtaagggactgcctttattactagtgagattgaacatcttttcatatcatgattgaccttttatatttcttcctctgcaaactgattatccaaatctttctcctgtttttttctattgaagtattttttcttattgatttgtagaaactctttatatattgtatatattatacaaggattttatgtgataattacttaaaaggattagcacagggaaggatacagaataattactcagaagaaggatgatttgagcattgttactttaataatgaggtgggggtggtaatatttaaatacttaaatgtaaataacactgtaacgtagtactcaagaacatgggctttagggttaagcagagactgggttcaaatcccagctccatgggtgccactggccatgttgttacgctccctgagcctcagctcccctactcataaatcttatctaaaagttgtaatgaagagcccatgacattctatctgcaaaggatatacaatacttagtacacagaaagcactttctaaatgctattattaattttgctaccagagagcctccctgctgcttcccaagggtaatccttaccagagacaagtagcatagcatgatggcaactgttttcaccagaagagatgagatgcagggtgtagatgccattgtcagatgcacgcacatcaataatgatcagggagccatcagctctgcctgtttccctgccagtgtgggctggtcctagggtgtagccatggctgaagaagttaaaattgaggatccgggtaacctgattggtggttgctcctcggagccaattgtaggagatgagattctgagggatcccctggacagacagggtgacgttgccccctcgacggcccagggagggatggatgtgatcgtcagctgagcagacacctgcttcttgcagaggctcaggaagaaggcaaagggaggaagcaaagagcactatcacagaggccacttagcagcattcgacagtagactcagccactgctagagtctcactcatcggagttaaactgtgggagtgggaagagcatgtgcaaaggccctgaggcaggaggaagatcattgtttttgagggaaaagcagggaagccagtgtggttggagttgagtaagtgaaaatgaaagaggtaagagataaagtcagagaggtaagagagacagatcacacttacaactggcattgacatttttggcaagacaattattcatcttgtggatccgtcctgtgcattgcaaggagtttttaacaccacttgctctccctactacaacagcagcagctccttccaggcattgagacaaccagagaacattcccacacattgtcaaatacccgctagggggcagtattagctctggtttggaacatcatgcaggctcttgcagataattatacgagtttttttgtttttgttttagtttttgtttttgtttttttgccacagagtctcgctctgtcactcaggctggagtgtgccagcttgatcatggtttactgcaacctccgcctcccgggttcaagtgattgtcgtgcctcagcctcccgagtagctgggaccacaggcatgcgccaccatgcccagctaatgtttatattttttttgtagagtcagggttttgccacgttgaccagactggtcttgaactcctgggctcaagtgatccttgtgccttggcttcccaaagtgctgggattataggcatgagccaccgcaccagcctgtaaggacttttcgttgtattctgagggagtcagagaaccactggagagttttgagttaaagattaacacgatgtaccttatattctgatcattctggctgcagattgcattgattttggagctcaagggtagagttgcaacattgctcagctccacgaagtgagctgccattcacattgtagttaatgcaaatgctacttccagcaactgtgcagtgcacaacccatacagctatatgtggtgaccccaggcaaggcagaagcaggagacaccatttaggaggtgactgcaacaatccaggtgagagatatcagtggggaagaaaatcagaaattatgatccgtaactgttacctgcaagacagagccatgtccaaagcccaccacctctgcagggaccttccaaggggccagccctgtttctttgatgcctcaccagtctagctgtccttctgcctcctcccagctggaggccaggcctaggggaagttcaatagtgtctgaaaagccccgccctctatagggtctttggttttacctcctctcagaagacagcccatcagtactgctccctggatcccactcccattcaccccagattccacactgagagtttggggcagggtccactggcaccagtttgggtcttaccaattctacagattcctccaggctctgccatcacagaaggtccagccccagtgctgctttggccagaaagaatgcttggcactgcatttgctgacaaggagtgtggcctgtgtttatcccagaggtgggtgaggcagcctctgctggttccagaggtcccctctgccacctgaggcgccagccatgcagtgctggtcctaggtggggttacagaggtattgacaccagcctggtctctgggttaatttttgttaagggcctgcgacccagtgtggaggggttgatattgcgcagccttgaaggacgtggacatgagcttatcagaacaagtgatagcaagataaaagatcaaagtaggctctttgcctcagattctgcatggcagcaatttccaccagcagggtccaaagacccaaaatgaacaaggaaagcaacctcctgaagggacacttggtaatcaccttgatctttggttttcaaagtctgcagtccacttggaaagcaaggtacaggggcagagagagttgacaaatatgtactgcttgatgaatatggaagaaacaaagaaaacagaagtttgaaaaccaccgacctagaatttttaaatgacgacacccagtgctagcgatctctggagaacagttttgcaagatgcatccaaaaacatacacatgtacactctctttgaccccaccgttcctcttacatttatcttaagataatcattatagatatgtgaacatatttacttctgggataatcatgacagcattgtttatagcaggaaataaagtggaaacaacatatattctgtctgcagagaaacagaagcaatctattctctctctctgtgtgtatatatacgtgtgtgtgtgtgtgtgtgtgtgtgtgtaaaatacaacaacaaaactgttcaccaatgatcaggtgctgtcctgttacatggtgaacgcattttatctttcccacagtcctagaagttagatacaactatcatcatctccatttatcatatggagaagttgagacacagaatcactggcccaaagtcacatggatgataagaggcagaaccaggatttgaacctttgcaggctggatccactgttcatggtccttcccattccactgttttacctctcaaatttggaaacattattctacctgccagttgttcagcagttactatcgccaggcatacactgaattatctcagttaattctcactccatgaagcaggatctcttgctgtccccattttatagatagaaaaactgacgctcagagaagaagagtcatttgttcaagtcatacagttagtaaatgacagagccagttacgctgcaagttacccagatttcaaggataagcggtatgtagtaaaaatacatcatgctatgagaattagagatgttcttctgaagatctgatgtttcatctgtgatctaaaggatgggtcagaattaagtagacaaagacagtgaggaagagtgtaatgactggagctccagcagccattctgaatgacgaactgacttaaggaaggaagctatgtctgatataatggaacagaaacatagaaggagcttgcgtggaacaggaatcaaaagaaattaaagactgtctaagcaaaaactcagttgtatgtaagaaaacccaattccccttgaggaagagaaacagctggagtcctttaaaattaactgcctgtttttctgtctgtggctagtgagccttatcgctccctttcccaggcattgtgaagactctttctctagctgtgcagctgcaaggtcattagacagataatctcaagtcgtaaaacatattattccttgaaaagtaagaaataatgtaatgcatgtcttaactgaataactgtttttaattcttgcttctgtaatacgcttccccctgcacagaactccccccaccccacgaaatgcttaaaaggtagcttgactctttgttcggggctcagtcctttggatgttaatctgactgggtcggtgcacctaaataattaaataattcctcctcaaccccttggtccctctgattccttaattatcccacagcatgggtacctggtgaccatgaagtcaccagaccacactgagatgtctgtatcagttacttatcaccatgtaacaaacctctctaaaacctaggaacttcgagagacagacaaaaatgcacaagacttgttgtggcctgggctcaggactgccactttattatttctacctcattgttttggtcaaagcaagtcatgaggtcaaccaagattcaagggtacaggaaaacaggctccacctgtttgtgggagaagctgtaaagtcacattacaaggtgcttcgatacagagagtagagaatcggagccgtgtctgtgatcaaccaaccacaacttattttacatgagagagaactacactcctttattaactaaaccactgttatttgagtttctattttatgcagctgaaccaaatccccacctgacataaagagtgttgcaaatggagagaagagtgtaagcaaaggcccggtggtgggaggctcatgacacttcaaatcactgaaataagtgagggggtggatttcggggtgagaagataaagtcaggcaactgctgcccaccagcacggtgtttcctgctcttcccaagagagactcacacatttgacaacagttgttacccacgcatcaggtgggttcagacacttggcaggtatcaacccaatgactgcaaccaaagaggatttagcatggggattttattacttgcaacaagtaaagagcacactagggatagttcccaaagcagtaacctctctgagctggggtgccgcggacctattggactgaacaaagtggggcaaacatgggaataaaagacaagagacaaagaagtatatttggaagaaagggtcagggggcaccttgcctctagtggacaagcgccctgagctttacacggccctccatatttattaggcaaaagagatagtgagaaagtggggagtgattgtcgagtaattgtcagtcgggcgtttggttcacagcaggctttcgagattgcatcctttgagcaataggcgctaatattctcagtagataacttcaaggagcccggagcccgggaatgatgtccctcagcaaaccttttggtggcagggcagtgtgagtttgcccacatcctgcattcatgataaacagtttgttatttgatcatatagcctccagcggaatgctgagttggtcacgatccctttggccttttcggctcccaacactgggggcagggtcaggatttttataagcatagggtaaggaggcatgatgtgattggatcttgcaatgaggtgatgccaggaggcatgatctgactggatcctgccatgatggggtgatgccagggcttgatctgattggctcctggatcctgccatgttatgtctgcttcttaattctgtccctgctccttggtccaaatgcttaggttcccctgtggttgcgtacttggttcacctgggcatgctcagtttatgtgacctgagggtccatggcaacctaaaaacaacttacaactttgttacataaaagttgaaccagattgtactgctacataatcacactgtaactcctggagcaggatctggttcaacctgcatttattaaacacatgatgggtggtggatctaatgctgcaggagttagggatgaaggcggggttccaagtgttaagaatttcctggccgggcgcagtggctcacgcctgtaattccagcactttgggaggtggaggcaggcagatcatgaggtcaggagatcaagaccatcctggctaacacggtgaaaccctgtctctactaaaaatacaaaaaattcgccgggtgtggtggcacggcacgcgcctgtagtcccagctactcaggaggctgaggcaggagagttacttgaacccaggaggtggaggttgcagtgagctgagattgtgccactgcactccagcctgggcaacagagcaag[211 bp omitted]gaggcagcagaatcgcttgaatccaggaggcgtaggttgcggtaagccgagatcgcgccactgcactccagcctgggtgacagagcgagactccgtctcaaaagaaaaaaaaaaaaaaagatgatcatgatggtttagggggttgaatggtggccccctaaaaaaaatatgtccacccaggacctgagaatatggccttatttggaaagggatcctcgtgatgtaattaagttaaagatcttgagatgaagtcatgctggattgtccagctatgccctaaatccaatgacaaagtgttgttataagagagagaagaggaaggccgggcaaggtggctcatgcctgtaatcccagcactttggaaggcagagatgggcagatcacctgaggtcaggagtttgagatcagcctggccaacatggcaaaaccctgtctctactaaaaatacaaaaattagccaggcatggtggcaggtgcctgtaatcccagctactcgggaggctgaggcaggagaatcgcttgaacccaggagatggaggttgcagtgaaccgagattgcgccactgcactccagccttgcaacagagtgagactccatctcaaaaaaaaaaaaaaaaaagacagagagagagagaagtggagaagacacggatacacagatacacagaggataaggccatgtgaacactggggcagggactggactgatgcagccatcagctgaataacacctggggccaccagaagctggaagtgtcaagggaggttcctcctagaacctgcagagggagctcggcctatgcacaccttgatttcaacttctgccctctggagcagtgagagaataaaatgctgttgttttaggttaacaagtttgtagtatgaggttggtacaaaagtaattgcagattttgccattacttttgcaccaacctaaataatttgccaaaaccaccgctggaaactagtatggatggtaacagaaacgtgtctgtgggaccagatagtgtaataggctgttcaggaggggaggtgatgagcttcctgtcacttcagggttaaggatggggaccttctcaggaagtcttgttttctaattgagatttcttccccatcagaagcatctcaaacctaaaagacattaggagttgcctctgttacatgtcgaatccacaaaccagtctcttcccttcttacctcccctccttcccaactggtatcttccctgcacacccctccaggcccctcttcctcaaacaccattgtccccaggacttcaatgtctaccctccccttggaaacctttagtaatataaaatcaccaaagcatcttaaaacaataatgcccagtgtgggcaaggatgttcagaaatgggcactctcatgtacatttcatggcaggctacattgccacaataatttcgaagggcaattttatgccatgtatcaagaattaaaatctgacttagctattttattttcaggaattcagcctgagaaaataacctgtgatgtgcaaaataaatttatacacatgacccttcctgatctatccattggccctgtccccagtcctgtcttttgctgatcacttgcttgaacagcacatgccattcagattaaatccacatcatggagaatgtgcactgtttttctttcctctgggctttttacatttgtaaattcctgccctccccttgccaattaactcctgctcttccttccaggataaattcagatgtcacctcctccaagaagcttcttggcctcctgggagcagattgggtacctcctcagggtccctaagtgccctcccttattgctcaaaaggcaatgctatggggtgattaacagggaagattccagagccagtctctgattctaacacctgctttacatggctatgtgactctgtgactctgggcaatttacccacatctctggctattctctctctctctctctctctctctctctctctctctctctctccttctctctctctctctctctgtcttttgagacagagtctcactctgttgcccaggctggagtgcagtggtgtgatctcggctcactgcagcctccgccccccaggttcaagtgattctcgtgcctcagcctaccaagtagctggaactatgggtgcacaccaccacactcggctaattttttgtattcttagtagagacaaggttcaccatgttggccagactagtctcgaactcctgacctgaggtgatctgcccacctcagcctcccaaagtgctgggattacaggctcgagccaccatacctggcctgttttctcttaaacacttattaatcgtttgctgtgtgccgggaactgttctgtgtgctttacaaatggcaattcattgaacctcccaacaaccctgtgaggcaggggttagagctacccattttgcagatgaggagactgaggccttgagagtttaaatggcttgttgaagttcacacagtgcaaattgcagagccaaatctgaatccatggcatcggcgactatacggtgctgcctctgggcctccatcctcatctggaaaatggggcccatagtaacagtgtcatatcgtttggatgtttgtcccctccaaatctcatgttgaaatgtgatccccaatgatggatgtgggcctagtgggaggtttttgggtcatggggcaatccctcatgaggctttggcgccatctttgcggtaatgaaggcattcacgctctgttcattcatgcaaaagctggttgtttaaaagaacctggcaggccgggtgcagtgacttatgcctgtaatcccagcactttgggaggctggagcaggagaatcacttgagcccaggagttcgagaccagcctgagcaacatggtgaaaccctgtctctacaaaaattaggcaggcatggtggcatacacatgtagtcccagctacttgggaggctgaggcaggaggatcacctgagcctgggaggcagaggttgcagtgagccaagcctgcaccactgcactccagcctgggtgacagagtgagaccctatctcaaaaaaataataataaataataaaaaaataaaggctgggcacagtggctcatgcctataatcccagcactttgggaggccaaggtgggcagatcacctgaggtgatcaagaccagcctagccaacatggtgaaaccccatctctactaaaaatacaaaaaagtagtttggcctggtggtgggcacctgtaatcctggctacttgggcggctaaggcagaagaatcactcgaaccggggaggcagaggttgcagcgagccgagattgtgccatcacactccaccctaggcaacaagagtgaaattccatctcaaaaaaaaaagagcctggtatctctcttgcctctctttcactaggtgatactcagcttccccttcaccttctgccatgatgataggcttcctgaagcctcattatgagctgagcagatgctgccatgcttgtacagtctgcagaaccatgagcctaataaacctcttttctttgtaaattacccagccttaggttttcctttatagcaatgcaaagcagattaattcacagtgcccccttgtagaggagctgagaggactagactgtttatgtcaagctcctggagcagggcctggcccatcctcagtgctcggtaagtatcagagagtatcatcagttacgggactatcctattttcctaccttctttatcgtttcatcatttctgttcatcatcgcctaaagcctcctgcctactattttccaggctctcaaaatggggtttctttgattttcatagcagcccgaaggggaagtacaatcattgccccattttgcaaataaggaaattaatcagagaggtcaagtgacttacctcagatcacacagatgacagaggtggagcaagaaattaatttggcttgtcctactcaaagattccctgccctgcaacttcccctttaagacatgattgtttaatagagtgagtctgggacaatgcacatttgtcaggtacgcaggctctgggaagctggaaatgggaccagccaagactagagctctgatataacctctgagaaatgccctccccaacctcagttctcagccacaccctcacctacgagcaacgctcccatccagggctcaccccagccatggggagcaaccaggaaccgggccatgggtcctttaggagtgcttcctcctagaaggacattggtttgcggagaacagactgcaagaaccccagagtgagccgatttgtgtgtcctgcccggagccctagcccagagaggagatggcccagccttctgtccccatgatgagggccgtgcccatggggcattggtggccagccagggagggactggcacagccctcttcggtttacaactgttcaatgtctcattaacttctcctctttggtcatgtctctggcccagcattcgtgccctttgctcttcccaatcatcctcatggtaggcaaacgtgggagggcaggggactgcatgctcccctcctggcttcctgctgtataaatggggaaacagaggccccaggagagcaagtgatccccccaggaccatacaaggagtctgaaatctggccctgactggattccagtctttggctcaagcctcagccagaagtctcatcctgcatatctggcccagtctgaagactcaggtgggagacaggaaatgaaaatcttcaggagcttcagggaggctcattggaaagaaaaggaaacttgtatttactgagaaaccagctttgccgatgcaacagcaaatcctgagctcagcgttcaaatttctccagaatccaaccacttctcaccagctccacccacaccagcaccatctcccacatggaccattgcagtagcctcctcactgggctccctgctcctgccctcctgctaacacctaagttgtctcatgtcccttgcctgctcagaggcttcctgtggcttctgtctcactcaggaaaatgcctaagtcccaacactggcctgcaaggtccatggtctggccccatccctgccccacccttatctcccgcttcctcccttactccccgctctccagccacactggcctctccactgttcatcaacactcagggcacagtcctgccccagggcctttgcatttgctttactttctgccccaaacactcttcccaagatagccacatggctttttccttcaccacagtcaggaccctgttcagatgtcacctcttcagagaggccttccctggctgtcctgtgtacagcctagcacttcctgtcccacctgtctggtttatttctttccaacacactcatcgccgtgtgacactctccactgatttgtgtttgttgattgctctccctaatatcagtcccttaaaggcagggatttctacctggtttttttaattctattttatttttttagagatgaggtcttgctatattgcccaagctggtcctaaactcctgggctcaagcgatcctcccacgttagcctcccaagtaggtgattctacaggtgcaagtgactgtacctggcccctctgcctgttttgttcactcttgtaaatgcccaaagcctagcgcagtgcctggcacatggtaggtgttcaataaatattttgtgaatgaatgtgtgagaccctgcactgagcagttgaatccaaattaagtgcaagtttccatccccatggccatcaggctagaacagagaggctcaaaaagccccccagccacacaccctataaggggaggagttggtatttggacccacatctaatgccaaagcctgcattcttaaccactgcattacactgctcctggatttagggattttactgatgagacccacagaaagtgtaatagccatccccactgatgcccctcccttagttaacgaagaaatctcaaagataagaatcaaagggccaggcggggtggctcatgtctgtaatcccagcactatgggaggctgaggtgggtggatcacctgaggtcaggagtttgagacccagcctggccaatatggtgaaatcctgtctctactaaaaatacaaaaattagtattggcatgcctgtaatcccagctacttgggaggctgaggcaggagaattgcttgaagtggaggttgcaatgagccaagattgcaccactgcactccagcctgagtgacaagagcaaagctccatctcaaaaagaagaaggagaaggaggagaaggagaaggaggagaaggagaaggaggagaaggagaaggagaaggaggagaaggagaaggagaaggggaaagggaaggggaagaggaggaggaggaagaaggagaaggaggggaaggggaagaggaggacgaggaagaaggagaaggaggggaaggggaagaagaagagtaaggggaaggggaggaggaggaggaagaaggagaaggagcggaaggggaaggggaagaagaagaggaagaggaagaagaagacgaggaagaggaggaggaggacggaaaagaagaagaaaaaagaagaagaaggaggaggaggaggaggaagaaagaagaaagaagaaaagaagatgatataggaaggatataaggacccagagcaagcccaggcacaagcagatgccttgaatattcttcccaactctgagctgagacgtcgtccccgcttggccgagggcagctctgccccctgttggtcactcatggcaacggccccattggtgtcccaggacaacagcgttgacaaggataacccaactggcaagtgctcaaaatccctaatatacacagagttcctgaaaagcaacaggaaaaaaagagacaatgcattttttcttttagatatagggtcttgctttgtcacccaggctggagtgcaatggcatgatcatgtctcaccacagcctagatctcctgggctcaagtgatcctccagctacagcctcccaggtagctgggactacaggcctgtgccaccatgctgggctaatttttaaaactttttgtagaaatgaggtctcactatgttgtccaggttggtctcaaactcctaggctcaagcaattctcctgccttagcatcccaaagtgctgggattcaacacaattttttaattggcaaagtacatgaataggcaactcacagaggacatcatcttcaaatgactatcaaacttaagaagagataggcagcttcactagcgatggaaatgtattttaaaaccaccttgggatacgaatgtttatatgtacatggagcaaaaaaaaagtgaaatattaattatatccagcaacaggaaagagaactgttataaacactgttcaagtatttggtggccattcactggcactggcttgtacccctgctgagcttgggggacaaggagccacagtgcggagctttgggcgtcccagtccacacttctgcctctgcactctcttattcccgtgtgtgtgtatccctctgttgtaacaccctagctctcagcaagtgacaggaaagagtctaaaaggcaaagttagggacaggacaggaccctgcacctgtgttaatcacaccccttcaccctccaacagggcagaagcaactctcaatgctatactgcctgtcctagctttggctgccgttttttttgttttgtttttgtttttgtttttgtttttgttttttgaggcggagtcttgctctgttgcccaggctggagtgcaatggctcgatcttggctcactgcaacctctgcctcctggggtcaagcagttctcctacctcagcctcccgagtagctgggactacaggcgcctgccaccatacccagctaatttttgtatttttagtagagatggggtttcaccatgctggccaggctgatcccaaactcctgacctcatgatctgcccaccttggcctcccaaagtgctgggattacaggcatgagccacagcgcccaggctgactgctgttttttaggctccctgtggtggtggggagtgtaggggttggtcaggtaatgctaatggaaaagaagggcagaccccaaatctctccccacccgtggcaccagtctttctacaatgggaatgctcccacccacgacttcaccctcatccagaacccaaccaccttctgttgcctcattagtcctgcttccagcttctgaggcatctccagggctagtgcaggggaaagagccagcagaaaggcctggactgccgtgatgcattttaccttgtttgtagacatggactgaaaagctgcaagaccagcaattataaatgagaataccagctaacctgtgagtggttactctgtaccaggcactttgctaggcatgccacatacatgatctcctttaataacataacccatgataacccatgataggccaggtgcggtggctcatggctgtaatcctagcactttgggaggctgaggtgggtggatcacctgaggtcgggagttcaagaccagcctggccaacatggcaaaaccccatctctactaaaaatacaaaaaattagccaggtgtggtggcaggcacctgtaatcccagctactctggaggctgaggcaggagaatcgcttgaacccaggaggcggaggttgcagtgagccaagatcacaccagtgcactccagcctgggtgacagagcaagactctgtctcaaaaaaaataaaataaagtgaagtaacataacccatgaaaaacctatatcgtaatctctgttttacaaaagaagaaacagatgctcagcgaggtatagtaatttgccaaatgtcactctgctagaaaatagctgagccagaattcaaacccagagcttgtactttgaagcatttccaatttgctctttgaaccaatttggaggctttcatttctggaagccaggctgttgacagctttcacttcttatactttttcccacctagaaaggtctggctgggtgcagaccaaatatgattctggtgtcaatttgaacagactgaactcaagtccacatggacccttcaggatggtccaactgggagaagccctgagggtcacacagaagggcctctccaccttcaacaagtctcctgaggatgagggcagtgcacttaccactcagcaaagccacacatgcatcctcattagaggggcaccctctctgctggagaaccggcaagtctcaaaattggggcttagtccaggagggttcttgcctttgcccaggaaagaattcaagggtgagctggtggcgttagacagcaatcttttattgcacagtactgctccttgcagagcagggctatctcataggtaatgtgctcagagcaggcaaggtagggactgttgccaactgtatttatacccacttataccaactttcacttacatgcaaattaaggggtaggtcaatgcaaatcgagaggtgggtcatttagaattttctaggaaaatggtggtaaattccgggtgatttccacacatttgtaaactgtcatggctctggtgagaatgtcttgtgctaatgcacaatgagggcagctaaggattgcttttgttgccatctgctggttcctgccagttttttcattctgtcccttcaggactgagaaataagtcctgccaacctatctcctacctcatcttttcctcagcccagtcggggatggtgggtgactaagaaccagactggttggaaaaacatgctgtgatttaaacctgtaatctcattctggatttttatagcagacaagccagttggacatgcccagtctttttgccataaaaccccaatgtgcaagggagaccagaccaactccattctagctgaggagcccctggctgggctgcctctggtccatattttgcatctccttatatcaagtctgagcattgtcttccaacccacggagttcttgaatgatggagcccagcctcttgatgggtattggcactcaagctgggctcctgggaaccccacatggccgcacccctctcccatgatgggggagaatctcctccctggaccctccctgtgggggcatcagaatctctggggcagcaacagggctggaagagaagcctggacttctccagaaactgtgtctgtatggccagcacatgttttcacttcccatgggtatttatatgagtgaagggcagatatagagtattaagagaataaggatcctaaaagcctccttggagtcaccaaggtcctccacagtccctacaacctttaactcctcagctcccctcacccagggaaattccagtcaaatagactgaaccacacaagtggccaaataatttcagggaagtttaaacccctttcagatgcgctagttgatcatatcttgccagttatcctcaagctccccaagccttccagccacctccaataacttcatagaaaccactggttgctaatgatcacggagtcctggactcctttgaaaatgcattgaaagttgtgtgatcctggactgaagcttcaggcccttcctcagaatatgcagatgtatgcacaatgcttcacacaatgtcagggatcctttccaaggaaatttacacccagacatatcatcatccaactgtggaaaatcaaacacaaagaaaaatctcgaaagcatccagagaaaactaaacacatcacttataccaaaacaacaattcagatgatggcagatttctcatcaggaaccatagtggccagaagaaagtggcactttttttttaagtgaaagcaaatttattaagaaagaaaaggaataggccaggtgcagtggctcatgcctgtaatcccagcactttgggaggccaaggcagtggctcacgcttgtaatcccagcactttgggaggccaaggcttgaggccaggagtttgagagcagcctgggtaacatggggaaaccttgtctctacaaaaaatacaaaaattagctgagcatggtggtgcatgcctgtaatcccagacacttgggaggctaaggcatgagaatcaggaggcagaggttgcagcgagtcaagatttgccactgtactccagcctgggccacagagcaagactgtctcaaaaaagaaagaagaaagaaagagaggaagaaaggaaaaaagaaaagaaagaaagaaagagagaaacgaagaaagagagagaaagagaaagaaagaaagaaagaaagaaagaaagaaagaaagaaagaaagaaagaaaggaaggaaggaaggaaggaaggaaggagggaaggaaggagagagagagaaagaaagaaaagaaagagaaagaagaaagaggaagagagagagagagaaagaaagaaaggaaggaaggaaggagggaaggaaggagagagagaaagaaagaaagaaaagaaagaaagagaaagaagaaagagaaagaaagagagaaaaggaataaaagaatggctactctataggcagagcaatggcatgggctgctcaactgagtacacttacagttacttcttgattatatgccaaacaaagggtggattattcatgaattttcctggaaaggggtgggcaattcctggaactgagggttcctcccctttttagaccatataaggtaagtgctagatgttgccatggcatttctaaactgtcatggtgcttgtgggcatatcttttagcatgctaatgtattataattagcacataaggagcaatgagcatgaccagaggtcacttttgtcgccatcttggttttggtgggtttggctggcttctttaccacatcctgtttcatcagcaaagtctttatgacctgtatcttggtggcacattttttaagtgctgaaaggaaaacaactgtcaacccagaattctgaatcaagtgaaagcattctttaggtttaggagtgaaggtgaacattgaggttagctcggtttcaccttgaatatgtcttaaatcccctatgcatgcagtgaatgtggttttatacataaaatgttgtacagcagtagctgtatgcatacttacagtgtgtacagagatgctcagtacccaacaggacaaatctgcaaaatacagcttcaccattgagccatagatggagctgctgcctcaaattagagctgtatttccacctgtttctatagttaaaatttcataaattaaatgtgtgtatgatgcaagtctactgcaattcctttactagagagaagttgcaagaaccaatgatccctgtttctttatattcatgccctcatctaattccttccccctgagtgtgggctgtacctagtgactcatttctaatgaatgaagtacagcagaaagtgatggctgtcacttctcagattgggttacaaaatggctgttgcttctattttcaacttctctctcactctgtcttgaatcactttctgaggggaaagctacctgccagtagcaaacaccatctgagtgagcttgggagcagaacaatcaccccataccctcatcccaagttgagcttttgaatgacactgcagcccccgtccagtagcttgatcgcatcagagggaaaagacctggctaagctgagcccagattcttgactcaaagagactatgagataacaaatgttttattgtcttaagccactacattttggagtaattagtcatacatcaataaataactaatgcaggtggccttctgggacacagaggaggatggagaaggttgaatatcagagagcagatcttggggacaaaaacacagagtcctcatcacaggttatcatgcgagcccagaaaacaagcatctaacatctcatcaataatatgttcccacacaccaccaatacttttaccaaaaaaagtactaatagctaatatttcagtttgtattttctaaaattgactccatatggctttcctttggtggaaaaggaaaaagaaaatttgtctctgtcattaacttaatgtgatgtgtcaaattttattttattttattttatttattttttggagcagggtctcactctgtcacccaggctggagtgcagtggtgcaatctcagctcactgcaacttctgcctcctgggttcaagcaattctcatgcctcaccctcctgagtagctgagattacaggcacacaccaccatgcccaggtcattttttttgtattttcagtagagacagggttttaccatgttggccaggctcgtctcaaactcctgacctcaaatgatccacccacctcagcctcccaaagtgctgggattacaggcatgagccaccacgcctggccaatgtgtcaaattttagatgaggacacagagaacaggacagaggacctgaactttaataatcattctcatatcaaatatggaaaccacgttgttacggtttaaatgcttgtctccttcaaaattcatgttgaaacttaataggcaatgtggcagtatagaaaggtgggacctttagggggcgattgggtcatgcaggttctgctctgatgaatggattaatccattcatgggttaatgggttaatgaattaataggttattatgagagtggcattagtagcctataagaagaggaagagagacctgagctagcatggccccttgtcatgtgatgccctgcactctatagactgcagagagtccacaccagcaagaaggctctcacgagatgtggccccttaaccttggacttctcagcttccatgactgtaagaaataagttccttttctttataaattacacagtttcagatattatgttataagcaacaattagaaaatctttaaatccacctgggacctggaagccccctctgcggcttcaagatgtcctgcctttctgagctaaaccaatgtataccttacatgtatcaatttatgtctttgcctataatttctgtctccctaaaatgtataaaactaagctataacccaaccacctgggcacgtgttctcaagacttcctgaggctgtgtcatggatcatgatccttaaccatggcaaaataaaattctaaattgattgagacctgtcttagatactttttggtttgcagctgcaaccaaatgtcagccagagttgctgtctcatctgaggctcaactcgggaaggatctgcttggaaaccagggcgttggtaagggagtagaccacccttcatattgtcttatgtccaatttctccctccaaagaaagaagaagtaaaaactaaaaggcagaaatgaaatccacaggcagacagcccggcaccacaccctgggcctggtagttaaagatcgacccctgacctaaccagttatgttatctacagattccagacattgtatggaaaagcattgtgaaaatccctgtcctgttctgttctgttctgattaccggtacatgcagcccccagtcacataccccctgcttactcaatcgatcacaactctctcacacggacctccttggagttgtaagcccttaaaagggacaggaattgctcattaggggagctcagtttttggagacgtgagtcttgccaaagctactggctgaataaagcccttccttctttaagtcagtgtctgaggggttttgtctgtagcttgttctgctacattggcagcattcaattgctaactggttgtaggactgaggatctccatttcttgctggattttgcccacatgggcctcccaacatgaccacttgtttcctcaaagccagcaagggagagagtctcctggaaagatgactctatgttacagaattgccagaggtgttcagaccagagcaactaacacaggagacagaaattatttaggcagatagtgagggcaaaagagctctcagcagaacttcccttctaacaaaaagtagcccaagaaatcatttttcctaacaaagagcagcctgaaaaatcgggctgcaaacataaataaggaagctagaagcttgcatgggggagagccagcagctgcaccaatagaaaagggctacctgggaggggaacatcacatactcggacctgtcaggaggtggggggatggcggggagagcattaggacaaatacctaatgtatgcggggcttaaaacctagatgacgggttgataggtacagcaaatcaccatggcacatgtatacctatgtaacaaacctgcatgttctgcactgtcatgcacgtccatgtgaagtgaccaccaaacaggctttgtgtgagcaataaagctttttaatcagctgggtgcaggcagactgaatccaaaaaaggagtcagtaaagggagataggggtggggcatgtttataggatttgggtacatagtggaaaattatagttaaaggggattgttctcttgcgggcaggggtgggggtcacaaggtgctcggtggggagctccagagactaattgtccaggagaaggaatatcacaaggtaatgtcatcagttaaggcaggaaccggccattttcacttattttgtggttcttcagttgccttaggccatctggatgtatacatgcaggcttgggctcagaggcctgatgtgcacatgtatcccagaacttaaagtaaaataaaaataaaaatagattctaaaaaagaaagaaaagggctacctgcggggcaggcatgtccaccatgaaagctcaatcttcccttttttgttagcaagtatacagtaagaaagaaatggataacattgtgcagctcaggctgaaaacccacctgcataataagactggggtgggggctgccagaaattcatgccctgtgcaaatggaacacctggtcctaaccagtttcttacaccctatgtagagcaggtactgcctccccaccagctcatctataaaaacccctgcatttcaccatggaccagcaacctatttttctgggaccccctctctgtaacagacagctattctctctcttttgcctattaaacttctgctgtcaacctcactcttttctttccccccaggggaaagtgtaaacgcagtcacccactaccacaaattatgcagtaacctcactctttgtgtgtccgtgtcccagttctccatggccgtgagacaacaaacctcaggtgtcacctcagaaatgaggccatttcacaacttcatcttgtacaggagctgggtaaaatagggctgacacttcctgggctgcattcccaagaggttaggcattcatagtcacaggatgagataggaggccagcacgagataggaggccagcacaagataggaggcaagcacaggtcacaaacaccttgctgataaaatgaaatgtggtaaagaagccagccaaaaccgagatggtgacaggactgacctctggtagtcctcactactctaattataacacattattagcatgctaaaagacactcccaccagcatcattacagtttacaaatgccatgacaatgtccacaagttatcctatgtggtctaaaaaggggaagaaccctcagttccaggaaatccctgcccctttcctgaaatactcatgaatgacccacaccttgcttagcatataatcaaagagtaactgtaaatgtactcagccgagtagcccatgccactgctgtgcctatggagtagctactctttattcctttacgttcttaaaaaacttgctttcactttattctatgaaaaaaataggctgggtgcagtggctcatgcctgtaatcccaggactttgggaggctgaagcaggcgaatcacttgaggtcagaagtttgagaccagactggccaacatagtgaaaccccatctccactaaaaatacaataaattagccaggcgtggttgtgcgcgcctgttgtcccagctacttgggaggctgaggcaggagaattgcttgaacccgggaggcggaggatgcaatgagctgagatcgtgccactgcactccagcctgggcgatagagtgagacactgtcacacacaaaaaaataaaaataaaaataaaaataaatgtatggactgctttgacgagtggaagaagttgggagtaatgccctcaactactctagtgaggtcataagacaaaaataaaataaataaaaatataaaataataaaatagaaataaatgtaaaataaaataaatacaaatataaaataaatgtataataaaataaatacaaatataaaataaatgtaaaataaaataaatacaaatataaaataaatgtaaaataaaataaaaatgaataaagtaaattaaaataaaaataaattattttattttatatgttgaaataaaaaggttttatatgttgaaatcctaatgcccaaggtgatggtattaggagatgaggcttgggtcagtgatgagatcatgagggaggagctctcataatgggattggtgccctcttataaaagagaccccagggagaccctcatcccttctgccatgtaagatccatccagtgcaccgagaactggggtgcttcaaaatgagcaaggatcgtgttggttctcagagccagatttggctccagcccctttagcattggtcctttgcctgctgagttccctcaaccaggcttgcctttccttctgttctgcactccccacccactcctgctggctggaactcagctgagccttcatagctgaacaacgagtgaatgaatgaatgaacaattgaagacccagcttcctgcttcaagcaggaagtcacccccagaacactgggctttcccatcttctggcccagatagcatcagtcttatctcctttactgaccataaatttctgtggggaaaagcaagagagatcagattgttactgtgtctgtgtagaaagaagtagacataggagactccattttgttatgtactaagaaaaattcttctgccttgagattctgttaatctataactttacccccaaccctgtgctctctgaaacatgtgctctgtcaactcagagttaaatggattaagggcggtgcaagatgtgctttgttaaacagatgcttgaaggcagcatgctccttaagagtcatcaccactccctaatctcaagtacccagggacacaaaaactgcggaaggccgcagggacctctgcctaggaaagccaggtattgtccaaggtttctccccatgtgatagtctgaaatatggcctcgtgggaagggaaagacctgaccgtcccccagcccgacacccgtaaagggtctgtgctgaggagaattagtaaaagaggaaggaatgcctcttgcagttgagacaagaggaaggcatctgtctcctgcctgtccctgggcaatggaatgtctcggtataaaacccgattgtatgctccatctactgagatagggaaaaaccgccttagggctggaggtgggacctgcgggcagcaatactgctttgtaaagcattgagatgtttatgtgtatgcatatctaaaagcacagcacttaatcctttacattgtctatgatgcaaagacctttgttcacgtgtttgtctgctgaccctctccccacaattgtcttgtgaccctgacacatccccctcttcgagaaacacccacagatgatcaataaatactaagggaactcagaggctggcgggatcctccatatgctgaacgctggttccccgggtccccttatttctttctctatactttgtctctgtgtctttttctttcctaagtctctcgttccaccttacgagaaacacccacaggtgtggaggggcaacccacccctacaatttcccaagcacaaacacgaggcctgacacatgtggacgtccccctctgcgtccccctcttattgaatttattttctgtgccagggactttacacgccatgtgtcactgagtgctcacaatgacacagtgaggtagaagttatcgtcatccttccacagaggaagaaagaggatcgtgtgcacaaagtcacctgcccaagacagttggaaggacaatgcaggtgtaagcctaggacattgatgtggagccccagaagaacatgtattctggccgggcacggtggctcatgcctctaatcccagcgctttgggaggctgaggagggtggatcacctgaggtcaggagttcgagaccagcctggccaacatgatgaaaccccgtctctactgaaaatacaaaaaaattagctgggcatggtggtgggcacctataatcctagctaatcaggaggctgaggcaggagaattgcttgaacccgggagacagatgttgcagtgagccgagatctcgccactgcactccagcctgggcaacaagagtgaaattccacctcaaaaaaaatattctataggcttatatataagcctatagaataggacagcttcactgtgtgctttttttgcagtgtgaaaaacatgctttcatgaagggattgactaagggatgtggagcagaggaaggaggaatgaggtgcgcctgggggtaggggcacttttagaagaggtcatagttaggggccagggacgggagagtgatcaccaggaaagaaaggaaagggagctgcctttgcgggcagccaggaggacttgagtggggcttaggaggaaggcagcactgggatatttgtttggccgacccattcaacagctattcccagacccgatggctcaggcttgtaatcccagcaatcagggaggctgaggcaggaggattgcttcaggccaagacttccggaccagcctgaacaacaaaacaagatggtgtcttgttctgtcacccaagctggagtgtactggcatgatctctgctcactgcaacctccacctcccaggttcaagagattctcctgcctcgcctctgagtagctgggattacaggcacatgtcaccaagcctggctaatttttgtatttttagtagagacagtgtttcaccattttggccaggctggtctcgacctcccagcttcaagtgatctgcctgcctcagcctcccaaagtcctgggataacaagcgtgagccactgtgccccacctcaaaaattcttttaaaataggctaagtgtggtggcgcacacctgtggtcttgggaggctgaggtaggagtatctcttgagcccaggagtttgaggttacaatgaagtgattgctccactgcactccaacctgggtgacagagcaagactatgcctcaaaaaaaaaaaaaaaaaattaacgaacactcctgccagttggaactcagctgagccttcatagttgaatgttgaatgaaagaattaatgaattaatgaagccaggcactgtgctgggtgctggagatgtggcagggtgcaggaccaagtccctgcccttgaggaactgacgtccagctgggagacagccaatgaacaaggcaaatgggtaaattacagggtctgtctgaggatggtcaatgccatggagaaggcaggaacggggaagggagatgagaaatgttacaatgctaggaggttggaggaggagatgcttgagcagacctggaggaggtgagggaagaagccagggcagatccgggagaggaccatctagacgggagggcgtcccagggcagaggtccacttggagctggagggtagcctggctgtgtgaggaacagggatagagggtgtggctggaggaaagtgagtgaggggagagggtaaaaagagagggcggagaactgcagggcgggagggggcgggtgtggattagacagtcactgtggactttggctttgactcagcctgagactggagcctttgagcagagaaggggcgagatatgatttaggctgtttgtttgtttgcctgtttttgagatagtgtctcactctgtcacccaggccggagtgtagtggcaggatcacagtattggctcaagcagcttcaacctcccagactcaggtgatcctcccacctcagcctgccaggtgtgcgcctgtagaaaatatctgcaaatcatattttttttctttctttctttcgttctttctctctttctttcttcctttctctctctctctttttctttcttctttctctttctttttcttcctatctatctctctctttctttctttctttacttctttccttctttctttttcttttgagaaagggtcttgctctgtcacccaggctggggggcagtggtgcaatcacagctcactacagccttaaactcctgggctcaaacaatcctcccacctcagcctcccgagtagctgggaccacaggtgcgtgctgccccatgcctggctaattttttagatttttgtgaagatgagttctcactacgttgcttaggctggtctcaaactcctgggctcaagaaattctcccaactcagccccacaaagtgctgggattacagatgtgggtcaccatgcccagctgcacatcatatttctgataagagattgatatccagaatatatagaaaacttccagaatacaactattttaaaaaaaaatccaatttttttaatgggcaaaaagaacttgaatagacatttctccaaagaacataataaatggccaataagtacatgaaaagatactcaactatccctaatcattagcggaagacacatctaaactacaatgagatattgcctcgcagctattagaatggctaccatcacaaaaacgaaaataacaaggattggcaaggatgtggagcagcaaacaaggaaaccttgtgtgctgttggtgggaacgcaacctagtatggctgttgtagaagacagtatggtggctcctcaaaaaattaaaaatagaggttgggtgtggtggctcatgcctgtaatcccagcactttgggaggcactttgagagagagagggacaatgagagagagaggtccctgaggggattggaacctctggttctgggtgtctctgtgctctcctgtcttggaactcatttataacaaatttccctttgtgtgtaaactgcctcaagttggactcctgccatatagacccaaaagaaccttaagagctacacctgccctgacaggatgcatcctgcattcctcctcccagagagagcattttgtcaagactagcttcagctgcaagtaacagaaaaccccaaaatcaaatggcctcaacaagatggaagtttctctttgacataaatggagtctggaggtagagagttcagggcaaatgtggcagtttcataatcctggggacacagcctccttcaattattactggcctgtcatcttcagtacataacttggggtccaagatggctgccagagctccagccatcatatccacattctgttcagtagtgaaaggattaggaacaaaagctatctttaaggccagctcctagtagcctcatataacacttctacttctatctattggccaaaagtcagccacatggccacacttagctccagggaacctagagaatatattttttgctggactcccatgcatccatttaaaaatcagggtatgtattaccaaggacatagaggatgtggacatcagaagcgtctcttccaaaaccttcttccttctgtagagatggtgggcatcctaaaccttcagcccctgagggtctctaaactgaaaagtttcctgacagacatttggagaactgattccaccaaaaactatccacagtgggccagtggatgtcactaacctggagcagatggcaacctggggaacaggcccaaggccaagcagccattaatcgccttttggagcccagccagaagaaactcttgataagaatcctagccccagccaggacaaggtccctgccctgcccagctgggagccaatgtgaatcaacaatccactcttcctgtgtggcagccagagggagtgtttacctggtgatcttcaggaactgtaaatggggtgagttccgatcttcttcacctccccaacccagagatgaaggatccagtcttgcacccccatctagacgagcccttatcttaccattgtcctcacccaaaatacacacctccacgaccaggggacaccattcacacagagcacaataaatggctcccaccaaggtgggcaaggcactggtcctgattctggtccacagccacctgggatgagaaggggatgtaagaactagattgagtggggtatcccccgctgtatccacttccagagaagggcagggcaaggtggagcaggatgagatagaacaataacaatagcttctatatatcattcacacaagatagattactcttgttacagcccaaatgacagggtcattgtagacaagcaacaggaagaatttggtggcaaatggcggacagtctaggagaagagcagagggcaacctggcccaggtagcacataactattctctcaggcatacctgttagggtcctgaccagctctctagatgagtgagaattgggagttgggagcagaaaccgttgggtattctttggacagttggagaaaagggaaagaagaatgggcatgggaccttgttctggccaatgcctagtgagaagaagtctgctgggggctgatgggagagattttattggatcttgaagagaactaggagcagcaattccccttttgtgtctctggatgcggctggccaccatcttggactgggagggaagtcaccatgagaggacaacctgttgaggctggggtaggaagatgaagaacctggatctttggtgttattactgagccattgtattaaccaaccgaggaactgccctttcattggaatccctgctacataagataatacacgtcagtgttttaaaccactttgaattgagttatccactttgtatggccaaaagcatccaaagtcatgtttgaggggctggttttctcgtctaaacacagccccggctcagttaagcataggatgggatgaggaacaggaacacaggaggcaaggaggaatgtccctgaaaatgtttgtaaatgtggggtcgacaccaagaggcagaggggaaactcaattaaaacttaaagactgcaagttgtcaccattgtagacgtctcagctttgcaagaagtcaagaattttccaaatgccactcttcaagagacaactgggcagatgtggatattattccaagatatgggaaaacctaatgtcaccattaacctttgaatgagatacagctgaaagtgacagattcttgagtccaaatgactggcccagattctcaggcgtcctagcacagcacaaccgaagttggcacttttctttcctactttgtttattcatcttggggatgcaaaacgctgcatgcatcatcttctatttattagtaatcctgttactcctatttctttcccatgttgtcacatttttaccgtattagagctgctgctttgttctcctctcaataccaaaaaatgtgattgcaagattttgccttgaaactctgggctgttgtaactcctggaaataaaaatctcagcagcataaaaaggagaaaatcattctctcttctgcaactatagaaaagcagacactctttccctcataaaaccttccttgtaaatgtggttctcacaaaggagtcctataagacacccagacttcagagactgctcttgctgcatcctgcaagagccacctctaacttcccaaagctgggctgattgtcttcatttctaatttgttattcctggtaatgacactcctttttcctaaaaagtacaaagaattatgagttttcattggccattctcccttcccctaccctcatagagctaaaaagaccacccaggactctgctagaaatttttattaaaacatatagataatgtaacagtcttgtctcatttaaatgaatattttccttcatgctgatatatggatggtggctgaaaacagcaagatgagaaaattgctttcatttggaatactattgcacttgtgtttcctaagatatttcaggggtcagtctggtgttaggacattcatgtgcttctgatttgattgaagattgaattaacttaaattcttttttttgttgttttttactttttttatttttttaaagacagggtctcactctgtctcctgggaatggctgggactggagtgcagtgacaggaaccgtaactcacggcagcccggaactcatgggctaaagcaatcctcccacctcagcctcctggtagctggaactacaggcactagctaactgcctagctaactttttaaaaaaatagatggagtctcactatgttgcccaggctggtcaggaactcctggcctcaagcaatcctcccaccttggcctcccaaagcactaggattacaggtgtgagcccctgcacctggcctaattcaatttctcagaaggcgaaggggacagatccatccctgggaaagacatctgactgttctatgatggaaaagagaaaggactctgactccattagtaccccacgatgatctgaagctgcgaaagtgacccatcagaggagctgctgtctccaccatcacaggcaggtggggaatcaaaaagctgctgctgttgctgctaactggaattgtcggctccagacctctgcagggcttgctgaattcacacaggcaagagcctctcaaaacacactggtgatgatacagaagatagaaagaaattatttaggcagatagtaagagcaacagagtccttggtggaattcctctttaacaaaaagcagccccaaaatcatttcttttctaaacaaagagcagcctgaaaaattgagctgcagacatagataagcaagctggaagcttgcatgggtgaatgctggcagctgtgccaatagaaaagggctacctggaagccaggtatgttcaacctggaggctccatcttcccttttgtttgttaccacatgtgcggttaaaaaaaaaaaagcaggcaacatggcactggccaggtagacaacccatctgcataatgaagctgggtggggcagccagcttctttgcgcgctatgcaaacggcacacttagtcctaaccagttcatcatgtgctatgcaaatggcacacctggtccgaccaatctttcgtgtcctatgtaaatcagacacagcctcctcaatctcatctataaaaccttctgcatttcactgccaaagtggcaacctattttctccagaacccctctctgtgcagagagctcttctctttctttcacctattaaacttcccctcttaatcttactctggtggtccatgtcctagttttctgtggctgtgagacagcgaatctcgggtatttaccccaggcaatgacactgtttcagtggtatctcaaaaaaaatctaaacgggtgtggtggcttacgtttgtaatcccaacacttttggaggccaaggcaggcagatcacttgaggtcaggagttcgagaccagcctggccaaaatggcaaaaccccatctctactaaaaatataaaaaattagccagacattggtggcgggtgcctgtaatcccagctactcaagaggctgaggcaggagaattgcttgaacctgggaggcagaggttgcagt[135 bp omitted]tgattccaggtcttgagatgataacttaactctttcaaccaattgccaatcagaaaatctttgaatccatttatgacctgtaacccctctgccccacttcaagttgtcccacctttctgggctgaatcagcgtataccttacgtgtactgactgatgtctgcctgtaacttctgtccccctaaaatgtacaaaatcaagctgtaatccaaccatctggggcacacattctcaggatttcctgaagctgtgtcataggtcatggtcctcacatttggctaagaataaatattttcaaatattttagagtttagcttttttcatcaacaaatgacatccttagtcctggccagaagtcagaaccaactgagagagagagacagatcagcatgtcatcagtatttcctaagcaatacgcaatatcagggaatgtggccaagctgtgtagcccaatgggtttgtcatcacctcctttgcttcctgtcgcctccaatctaaatatcaacataggatgtaagtttggatgctggtgatagattaaaaatagcaatggcttaaattccatagaaatgaatttctctctcctgtaacagtcctagctggtatgcagttctgctttgtgagggtatcatgagtctgtgctcttccatcttgttctctgctatccctatgatgctgagcttgtaaaccaaaaatacaactcaaagccgccacctaccacacacctaaaccatctgaacggactccctccttggccaggccactccaaatttaacctgaaagactggttcagcccatgacgggtgggatgggggttggggttggatgtgctgaagcagggttgttcgtcttgggtaatacccgagattcgttgcctcaagccaatgaaatcaaggatgtggacccacaaggagtgaggttaggagcagaggtttaataggtgaaataaagagaaaattttgctgtcttctgcagagagaggggggtcccaagagggttttccggtccatggtgaagtgcaggaggttttatagatgagtttgaaaaggcagtgtctgatttacatagggcacaaaatattggtcgaaccaggtgtgccatttgtatagcatgcaaagagctggttagggttaggtgtgccttttgcatagctcctgaaaaagctggccaccccaccccaatcttttattatgcagatgggctgtctacctggcctgtgccatgttgcctgctttttttttactgtacatgtggtgacaaagaaaagggaggataaagcctccatgttgaacatacctggcctccaggtagccctattctattggcacagctgccggcattcacccaagcgagccactactttggttatctatgtttacagctcagtttttcaggatgctctttgtataaaagacgtgactttggggcggctttttgttaaaagggaaattccaccacagactctgttgcccttactatctgcctaaacaatttctttctagctcctgtatgagtgcttcattatggccgcatcccttttggagttcaggaaaaacagaccagcatttaacatcgacacagacctgaagtctgataagaaacatttacaatccattctctctgaaggctgctacctggaggcttcatttgcatcataaaactctggtctccacaacctcttatcataactcagacagtcctttctattgataataactctttcaaccaattgccaatagaaaaatttttcaatcgacctatatggaagcccctcccccaccactttcagttatcccacctttctggactgaaccgatgtatatcttaaatgttttgattgatgtctcgtgtctccctaaaatgtataaaacaaagctacaccccaaacatcttggccatatgttttcagggtcacctgagggctgtgtcatgggctatggtcactcatatttagctcagaataaatctcttaaaatattttacagggccaggcacagtggctcatgcctgtaatcccagcactttgggaggccaaggtgggcagatcacctgaggtcaggagttcgagaccagactggccaacatggtgaaaccctgtctctactaaaaatacaaaaaacttagctgggcgttgtggtacacccctgcaatcccagctactcgggaagctgaggcacgagaattgcttgaacctaggaggcggaggttgcagtgatccaagattgtgccactacagtccagcctgggtgacagagcaagactctgtctcaaaaaatgtatatattttagagggttttcatcgacacgcttgttcccagggcccctagcgtgtcgcacacttgttcccagatcccccagcatgtccccacttccacctgaaggtagggaaaacaagaaagggagaactttattgaagggcatgacccagaaatggcacacaactcttctgttcacataccattcaccagaacatgctcacgtgactacagctgctgcaaggaaggctgggaaatttagtctttattccaggcaaccattggccaaacttaaactcctctaactatgaaaggactcgtagattggggaggcaccactagcttctctgccatatatatttacaaccccaatagttgcttcctctgctaaggcaggtacattatcacatagtaggaggaagcagaccaaactgtagtcgttctggagacaggtaaatccaaaaatgggaggagaggatctgagccaagtaagctcattttcttctcccagactcatcaaactcatagcaggggacaaaagccaaaagttttattccaacttcagatttctaactggggcagtattaatattttagctgagacaagtttctgttgtatgggacagtcccacctattattgcaggaggttttgcccaataaatgtcactactgtttcatcctcaggcattgtgacaaccaaactgtaggaagatgggctgggcacagtggctcatgcctataatcccggtgctttgggaggctgaggtgggaggattacttgaggccctgagttcaaaaccagcctgagcaacaaaatgagatcccatctccacacacacacacaaaatcaaattgtaggaagagatttccaaaacctctaggaggggcaggggatgccttcgactgggaaatataggggcatttgtaaccacaccagaccaatctgattcaacttttatgtaacaaagctgtaagttgtttttcagttgccacggactcccaggttgaaggtccataacctaagcatgcccaggtgaaccaaacgtgcaaccttgactgaaacccaagtactcagactgggaagtgaggattgaattaagaagtggacactgcatggcgggatccaggatccaatcacattgagccctggcatcaccccagggcacggtccaatcaaatcatgcctccccacatcacctcattacaagatccaatcagatcatgcctccctgcaaataattacaaatgtagtacgagaaacactgaggtttgggaaatgttcacaataaggcaagatccaatcagatcatgcctcattacccttgggactataaaacctgtcccaacccctagctcagggagatatatttgagcctgactcctatctccttgcttga[139 bp omitted]cggtgaaacaccatctctactacaaatacaaaaaattacctgggcgtggtggcgggcacctgtagtcccagctacttgggaggctgaggcaggagaatggcgtgaacccgggaggcggagctttcagtgagccgagatcgcgccattgcactccagcctgggcgacagagtgagactccatcaaaaaaaaaaaaaaaaaaaaaaaaattcccaaggctttggtgtgtggctttccattgtgtgcaggcaaacagacccagttcaggtcggtgacatgtccttctcatagagatgtgagaaatgtaggattccctcacacagggcaggagaaatgatgactgatggtacagggactcaaggagccgggagaacaggtcttgaccttgaatgtcagtaaattcattgtctgagaatgggaggaaggaagtgagactggctcacaagtttatgggtgggggcaggaaataaaatgtgttcagacccagtgagtgaaatttaaccagaggaagctgagctggttcttgggtataattatgagtgatctaggctttgtatatggcagtgaaggctggaatggctgctgagaaaattggaaccaggaactgaccaacgagaaataaacagatttccagagattgctcaaggtctgtttgaagctgggcacatggatttgtggaatatgatgaggtttttttttttttaaataacccaatcaatcttttattttttaatttatagtaacccccttttattttttgcctttgttaaatgcccagacatgccacagtaccaagcattatcaataccaactcacattcctttccttatttaaaaaaaaaactaactttctaactcattacaaacaccccttcccctttcctctccactttcttttacgtgcccaccttatctaaaaaaaaaccaaacgtttagccaaccaaaattagtttaaattgtacgacccaaccccagccaatggggaaagggtaaaagagcaagacttgcatgaaaaatagactctcgtgcccctttgctcaggtatgctctcatggcaactggccaaagagacacccacccctctgcacaaaaataaaattgctttgctaaaaatcctttgttcaagtgttcaatttccttaaaattttaaacgttattcctaacagattcaaagtggttccaggatggaagggcaagttcaacctgtttgttccttcaacctggaatgcacttccccacagccccacactctcacccaacaccgacctctcttcacctatcacagagccaaactcaggatcccaggtccaaatccctaagtccaaatcctgattttgccacttacttgagcgtgaacttggacaatttatttaacctccatgaatctctgtttcctcatgtaaaaaaatggaagcaatttctaccagctagggatgttaggagacccaaatgactttaaaaggttgttgcacttaagaacacagcctccagagcctgatacctggttctgcccagttattcagcagcttcgtggcctggataagtcacttaacctctctgagcctcagtttccttttctgcaataggagaacggcagcacctgcctcacagcgttgttgaaaggataaaagagctaaacgatgtaaagtgtgaagttacataaacgaatatatgtaatgctaatctatgcaaagagtaggactgggctcagagccaagttctccataaatactagcaattgtcatgactatttcctccatatgggctcctgctctttcagtgacacacaaaaaaattccacatggtatgtggacagatatgttttattttcattttgttactgtcatctacatttaaatataattagcatattcatatataatttcgtgggtgttattgtttaaaaaaatgagtgaacttattttagatgagtcattttaaagaaaaatgttgagtaaagaaaagtgtagccggaggccaggcacagtggctcacgcctgtaatcccagcacttcgggaggccgaggcaggtggatcacttgagatcaggagttcaagaccggcctggccaacatgctgaaacactgtctctactaaaaatacaaaaattagctggacatggttgtgggcgactgtcatcccagctacttgggaggctgaggcaggagaatcgctggaacccaggaggcagaggttgcaatgagttgagatcacaccattgcactccagcctgggtgatagagcgagactctgtctcaaaagaaaaaaaaaagggtagccaagtgcagaggctcaggcctgtaatcccggcactttgggaagccaaagcaggaggatcacttgtgcccaggagtttgagaccagcctgggcaacataggaagatcccaactctacaaaaaaatttttttaattagtcggtcatggtggtgtgtgctgtagtcctagctactcggggggatgaggcaggaagatcacttgagccaagaggtcaaggctgcagtgagctgtggtcacaccaccgcactccagcctgggctacagaaggaaaccctgtctcaaaaaaaaagaaaaagaaaagtgtaggtgatgtgtgcatatggaaagaattacgaatgtggtatgagaaacactgaggtttgagaaatgttcacaataaacaaagcgggacatcagttaaagctgtgaaaaggatcttattcagtaaccactggcagtaggggaaagagctgagctccgttcagattcctgcagaggtggctgggtgtctagaaggcagaatgagggatggcgagagaagggcactgcaagtaaaaatcataaaaagttggctggctcatgcctgtaatcccagcactttcagaggccaaggcaggtgaatcacctgaggttagaagttcgagaccagcctggccaacatggcgaaatcccgtgtctactaaaaacacaaaaactagctgggcgtggtggtgtgcacctgtaatcccaactactcaggaggctgaggaaggagaatcgcttgaacccggaaggcagaggttgcaatgagccgagatcatgccactgcactccagcttgggcaacagagcaagacaccatctaaaaaaaaaaaattgtacagtgtcaatgggattcagccagctgtgtctgctagctggcaattgtcatagttagaattctatcctcccgcagagactgggagatggaggtcctctccttctgacaattctatttcaaaggaatggctttcagatcctctagaaacacccctgagttgtaggatatagatacatatacacccatgtctgaaaaaggaaggagtcataattgtaggcccttcttagtaaatgctctgaaaagggaaattaggggtatattgccagatattggctaggtcagacagtaaattctcctggcaaggtagagctttctcgggtggtattttaactgggggctggagtcatcctaagaacacgaccttatgctgc[134 bp omitted]gcagcctcgaactcctgagcgcaagcaattctcccacctcagcctcccaagtagctaagactacaggcacatgcatgccaccatgcccagctaatttttttatttttttgtagaaatgggggtctcattatgtttcccaggctggtctcaaacacctggcctcaagcaatcctcccacctcagcctccctaagtgctgggattacaggcatgagccaccacacctggccttggtcatctcttaatgcagaggtttacatggagttctgcagtcctcagaaacagtgacctgctaagttctcctcgtcctgcaggggtccgcttcaccgtctcttccccagagtcttcccttatccagcctgagtctcagctagattgagagtcagatcctttcaaagctctgtttttcatctttcctttccattaaagttctttcttttctttttttttttttgagaccgagtttcactcctgtttcccaggctggagtgcaatggcgtgatcttggctcagcacaacctctgcctcctgggttcaagaggttctcctgcctcagcctcccgagtagctggcatgcaccaccacgcccagctaattttctatttttagtagagacagggtttc[132 bp omitted]aactgaatcccaaaacaaactgacttcaggggaaacaatgagaatacacagaccagcatagcacacaagctgaaggatcagtatggacatcaggcacagctgaatctaggtgtttaaatgatgccattagaaatctctctttctgtgcattgactatgctttcacatgtgttggcctcgtttttaggcaatctctctactcatgatagaaagatggcccccagcagctgcacactgagatctcttcagctcagcaaacccggaagcaagaaaaaatgcttttaggctgggtgcggtgtctcacgcctataatcccaccactttgggaggccgaggcaggtgggtcactggaggccaggagttcaagaccagcctgggcaacatagtgaaagactgtctctactaaaaatatgaaaaaattagctgggcatggtggcacatgcctgtaatcccagctaatccggaggctgaggcatgagaatctcttaaaccccagaggtggaagttgcagcgagcagagatcacaccactgcactccagcttgagcaacacagcaagactctgtctttaaataaataaataaaaatttaaaaacagaaaaaagaaaaattgctttattccccagagttccaataaaatccgtaagagattgcttctccttggcctgttctgagtgccacgcccaggtctccaaaaatcactgttgtcaggggatgaagtgctctgattggccagtcctgggcccctcacctccctggagccatgaggaggctggtttccaaaagagaactccaggtgctgttacctggatacaagagagtactggctgggtagaaaccccagaaaccttacaacataatggttattaactgcatcgtaaatatttactttttcctacagtggtctcctgacctagctaatcactccagcagaggccttcagaccaactataaaaaaggcactttagcaaatgctaataaagaaataactgtgtcacctgataatgactattattagagacttatgggtgaaccttagcccctgggtggaacctgaacctctctgggagggaaaagcatgagcttctaagtcagaaagatctgagttcaagtctgaacactcccatttcactcacttgctcttcattcatttattcactaaaaagaaaacatgtaggctggctaggtggttcatgcctgtaatcccagcactctgggaggctgaggcaggaggatcacttgagcccagaagtttgagaccagcctgggtaatatagtgaaactctatttctacaaaaagaaaaaaaatttaattggctgggaatggtagtgtgagactgtagtcccagctactcaggagactgaggcaggattattgcttgaatccaaaaggttgaagctgcagtgagctatgaccgtgccactgcactccagcctggctgacagagtgagaccccgtctcaaaaacaaaaacatgtattgagcacctgttatatgcaaggcactgttctagtcactagggacatagccacaagccagacaacatccctgccctcctggatctgatattcaagtcggagaggtgggactaaggagggagagacagataatacaagtggacaaataaataaatcatctaaaatagcggtaaatgatgtaaagaaaacaaaacagtgtggcttgctagcaaagaggtggggaactgagttgcagcaggcattaagaaaggcctttttgatagagtgatgtgtgtgaattaagccaaaataataagatacagtcagctttgagattacatgagtaaggttctaaggagagggaacggctcatgcaaagcccctgagctggtgcctccaaaaactggcagaaagcccctgtgaacggttgtgtgatggtaggtgagttacttagcccctgtgcaccacgagaaaatggggatgctcatatctacccctcgaggttgctatgaggattcaaattaggcaaccctgttacaaggttaatgctgtgtccggcatatagtaggtgttcaataaacaccagctattagtttgagtaatataattattaatttgaggaggaaagaatggacctggggagtgagaagggtgaggaaaaagtagctagtgtagcttatccttctagaatctaaaattcaggatatagtctgagcaagctcctgataacgggattctaaacatgcctccaggacatcctagacaccaaattataattagcattgacttcatagtgactgccattcgttgagcgcctactacgtgaccaggcactactccaagcaccttgtgtccacggccctgtctgactctggggcaggcactattattaacgcctccattttacagaggagaaaagctgtggttcagagtccaaagccccgtcacctcctaccaggttgacctttggccattccttgcctttgatgtgagtgataggagcgggcgattctgcttctccctccatctcccggcggggattgtacggtgagagaatgagagcaaaacctcagagcccccttcccaggaaccctgtcccagcctggtccccacccaccaccaccactgacccgatgctagagaaggatgcggctggaggtgacttcccagccaacttggtgtaagtcatgtggggaagtggccagggtagggcatggtcatcgtgagcagggtcctgcagggtgaggccggggctgcagacgcgactgtacaggtctatgaagaccccatgtgtgatgaggagaccttctctgcacagtccctggacagaacacgagatgaggggtcctctggacgtcagctccagccacacccctacctggaggaagctgcttttaacaggtgcgttggagacagcggcttcaccacgggccagggacaaggaggagagtgtctccttacgagtccaagtcacccccactcagagctttgaccctgtcagtttgaggcccatgcagctcaggcacccaactcatgagaactcttgaaggccactccgccacaagagatgaccctattggcttcttttaggaagaagggaagtgaggcgcaaagaggagaacaggtcacctacccaagatcacagggctggcaaggggcaggatcagaatttgggaccccagcccagcccccttccaccagaatgccctgtctcacccctgcaatccgcaacttagtaataatacatataaataataacaatcataaaataataacagccgtaatagaaggtcactgtaactgaatagatctatataccagcctgtttggggtttttgtttttttgttttgttttgttttgagacaaggtcttgctctgttgtccaggctacagtgcagtggcccgataatgactcattgcagcttcaacctgctgggctgaagctgttctcctgcctcagcgtcctgcgtagctgggaccataggtatgcgccaccaaacccagctaattttttatttttagtagagatgaggtcttactatgttgcccaggctagtctcgaactcctgggctcaagcgatcctcctgcctcggcctccccaagtgccaggattacaggcgtgagccactgcgcccagcctgtcagcccgttctaagtgctttcctatagtaacatttacctcttatcacaactctttgagatcagagctgtacgatccctatttcacagaaggggaaactgaggttcagagaggtcatgtgccctctccaggtcacacacttggaagtggcagactgaagatttgaagccagatgggctggcttcccagaccacactttccagagaccacacacatctgcctctcagatagtgaatgaattgcttc[211 bp omitted]gaggcaggagaatggcgtgaacccgggaggcggagcttgcagtgagccaagatcgtgccactgcactccagcctgggcgacagagcacgactccgtctcaaaaataaataaataaagttcagttctgagccgggtgcagtggctcacgggtgcagtggctgggattacaaagtgctgtaatcccagcactttgggaggccaaggcgggcggatcatctgaggtcaggaattcaagaccagcctgaccaacatggagaaaccccgtctctactaaaaacagaaaattagctgggcgtggtggtgcatgcctgtaatcccagctacttgggaggctgaggcaggagaattgcttgaacccaggaggcggaggttgcggttagctgagatggtgccattgcactccagcctgagcaacaagagcgaaactccatctttaaaaaaaaaaaaaaaaagttcagttccatgtaattttaaaacctcaaagtccacctagttcaaagctttgctctgtccccagctcaggcaggtgtcacactggaaggaggaaagggacgtggtgggcctcttccctattttgtcagagctgttgtctgaggcctctctcagggcggagggcagaggggaggaaggaaagaaaaggagattggaaagtttctcctaggctgctgtagttttgtgatggaaacacggcatgctgtgtgttgctggatcttcctgggggcgggagggtggggtactttggaaattggctgtgccactggataaaacagcaaccagtttttagaaagtggtttacaacatgtttgcaaagtgagctgggggagcttacaaaacattgtccaaaggaaaacaaagccacagtgcaacgaacttcaactctgtaaatacaaaatgttctcttgataacagcaggtacctcgagagtgtgaccaggacaagcgtaggggtggaggtcaaagggatatttggctttatatgggtctacttttttttcctaaggagaagctcttgagtgattaaaaattaattttaaaaattatgaaaaaccttcaaagaaaatatactccccaaagtggttatctgagtattaggcttaaggatttgttttactgctttttactttactttccaaattattctataatgaggagcagacgttgttttttgtgatgccttgtaagaattgctgaacataattctactttttgtttaaaagaaatagaaacagccaggcgtggtggctcacacctgtaatcccagcactttgggaggcccaggcaggcggatcacaaggtcaggagattgagaccatcctggccgacatggtgaaaccctgtctctactaaaatacaaaaaaattagctgggcgtggtggcgcacgcctgtagtcccaactactcgggaggctgaggcaggggaatcacttgaacccgggaggtggagcttgcagtgagccgagattgcaccactgcactccagcctggcgacagagcgagactccatctcaaaaaaaaaaaaaaaagaagaaggaaatagaaacaataacaagcataaagcttgaaaaaaaaaaacagtaaaagtttccaaaacatagtgtttatttctaggagtctaagttttctgctataaaaatggaaataaataaatatatatatatgagtatatatgagtaataccatatatgtagagagagagagggagagagagaaaaagagagagagagagagggagaaaggtcttgctctgtcacccaggctgcagtgcagtggcaggatcatagctcactgaaacctcaaactcctggacttgaggaatcttcccacctcagcctcctgagtagctgggactacaggcgcgtgccaccatgcccagcgaattttttatttttgtagagacagggcctcactcagttgcccaggctagtcttgaacttctggctcaagtaatcttccagccttgccccacccctccccccgcccccgcaaagtgcaggattacaggtatgagccaacacaccggcctactcttatattaaaaaaaaaaaaaaaatgcctatcaggagtgaaaggattaggtgtggtgcccaagagacgcagggattctttttggggtgacgaaaatgtccttaaattgcttgaggtgatggttgcccaattctgtgagtatactaaaagctcttgaattgtacgctttaaatgagtaaattattggctaagaaagtagattttatgtgttctcaccacaaaaaaaataagtacatgaggtaatgcatatgttaattagctcaatttagccattccacaatgtatatgtattttaaaacatcacattgtacaccataaatatacacaatttgtatttgttaattttaaaaagaaaaaatagtggcaaggttataacttaatcagtgtccagaacaaacattatgtcaccctttaaaaatgtaccattcacattgatttataaccctttattatttctaaataaggtggtgagaaaatgttgggtgaggggttgggtaggagtaaatggagcaaagcagatcccagaaccagaagacattagtagtatatggagagagacactcaacaggagctgtgggctggaacagaaggacccagccaactgtaggactaatcccttcaagcttactcccccgctgccctctcctcttctgccaacgtgcccactgacagaaaccaaccagcagcaaaaggtaaggggaccccaacaacacagctcagagaagtcagcctttcaggcagcagagtggagcagagaagggtagaaaaccaatttttgcaacatccagtataatatacgtgcgtgcttcaaggggtcaaggagaggaatcaatgattcctcctccttccctgctcttccaaggcgccctgctcacatcctgcacctgctctgccttctcagagctgcccttctcggcacagctgaacaccttgaccgaaggagccagtgtccatcttcctgtccccggaaggcttgaaggcattctcaccacgtcttggttctgagggtatgacgcccagccagcagccatgatattctccccgaagggcctcccaggacctgctcacactggccgggagatgctgggaacccaaggcagcctggtcattagaaaatgacggctcaggactcgggcagctacaccgtcgtgctggaaaccagcaggggacacaggagtgtgacggagcagatccatgtcaagagtgagtggggccccgcagtgggaggggctgacttctcagaaagcagacccactggacctcagaagagcccaccaggacactttgcatgctggttatccattgctccccaataaaccaccccaaaacttaaaacatcaatcacttatctagctggacagttgttgtgttcagctgttggggtgtctgggtgttggctggtccagaatgacctccttcatgtgcctggccatggaccagctggtggctggagtgatggggatgagtgggccacatagcctcccaacctccagcaggctatcccaggcttgttcactcagcaatggaagaggaacaagaggtaaagctgcaaaactccttcaggcccaggctcaaaactgaccaccatcacttctgccaccttctattggtcaaagcaagtcacatggccagcccagcttcaacaggaaggaaaaaggccccacctcttaaggagaggagttgcaatgtgttgtggctattttttgtcgttgtgttagattgttcttccattgctataaagacatacctgagactgggttatttatttaaaaaaaaaaaaaaaagaagaagacgtttgattggctcatggttccacaggtggaagtgtaatgccagcatctgctcagcttctaaggagccctcagggagcttttaatcatagcgaaggcaaaggaggagcaggtgtctcccgtgagaacaggagcaagagaaagagagagtcagagaggaagtgccacattttacaacaatcagatctcatgagaactcactaccatgaggacagcgtcaagccataagggatccgcccctgtggcccaaacacctttactgaggccccaccaccaacactggggatcgcatttcaacatgagattttggcagggataaatatccacattataacagccaagacttgcaacagacattcatgagatacgcattcatcatcacttgggaaaggtagagaaggtctggtagcagccttcaacctcatctatatttttatcacctggactcaaactttcatatctgaattaggaaaacaaagccctgagagtaaccagacccatcctccttttagaagatagtccagagactgtcctagtcggctcgggcaaaatactctaggcttaatcaacagaaacttattccctcacagttctgaaggatggattgcaagatgaagctgctggcaggtttcatctcctctgaggcctctcttttttgacttgcggaagggtgccttctcattctgtccttgcatggtctttcttctgtgtgtgcacatccctggtgtctctctgtgtgtccaaacttcctcttcttataagggcaccagtcaggttggattaggacccaccctaacaacttcattctaacttaatcacctcgttaaagaccttatctccaaatacggtcacattctgaggtactgggggttagggtttcaacatatatgtttggtgggggactcaattcagttcataacagagatcaacttagttagggttcagattctgatgctctaacaaagactcaaaaagttccagtgtcggccaggcgcagtggctcacgcctgtaatcccagcattttgggaggccaaggcgggcagatcacgagttcaggagttcaagaccagcctgaccaacatggtgaaaccccgtatttattaaaaatacaaaaattagccgggcatagtggcaggcgcctgtaatcctagctattcaggagactgaggaagtagaatcgcttgaacctgggagtcggaggttgcaatgagccaagaccatgccactgcacacttagaaccccacttctgcacagaggggtttttactcccctcccagagaatttatggaccgctgaggttcatccatctgtatttctgtgatttgatgactaattttgtgtgtgtgtgtgtgtgtgtgtgtgtgtgtgtgtgtgtgtgtgagatggagcctcgctctgtcgcccaggctggagtgaagtggtgcgatctcggctcactacaacctccaccacccgggttcaagcgagtctcctgcctcagcctcctgagtagctgggatcacaggcgcccgccaccacgcccggctaatttttatatttttagtagagacagggtttcaccat[139 bp omitted]ctatgccattctcagtccgaagggccctttctaaagagagaggttgcaggaactcacgctcggtggtgcaggctgtgtggccagaactccctggatcaaatccctctggcatctgttatgcccctgagtccctgcaaaaaagtaactttctgttttgcacttcagtttccccatctgtgcaatgaggtcatagtggaacctacctcatagggtgactgtgaggagtaagtgagttaatcagtgctaaatgcctacaacaatgcctgacaaagagcaagtaaatgttagccctggccaggtgctatggctcacacctgtaatcccagcagtttgggaggccgaggtgagaggattgcttgagctcagaagttcgagaccagcctgggcaacatgatgagacgcccatctcaacaaagaatttaaaaattagccaagcctggtgatgtgcgcccatagtcccagctactcaggaggctgagatggaaggatcccttgagcccgggaggttgaggctgcagtgagctgtaaccttgccactgcactccagcctgggggacacagcaagaccctgtctcaaaaaaaaaaaaaaaaaaatagccctgtttgtttcaaaggacttgacttctttgagccttccttttctcatcaaaatgggaataaggccggcacggtggcttacacctttaaccccagcactttgggaggacaaggtgggtggatcacttgagcccgggagttcaagaccagcctgggcaacatggtgagaccccatctctacaaaaaatagctggatgtagtggcgcacgcctgtaatcccaactactctggaggagactttgagcccgggaggtggaggttgcagtaagctatgattgcaccactacactccagcctgagtgacagaacaagaccctgtctcaaaaaaaaaaaggaataataataattacttcataggattgttgtgaggattaaatgaataaatccagtggctttcatgagaaatgcttttcacatcatgtccagtatatcccacaactaaccaaaaggcaagtgtagtaacagttattactatgagtaatgctctctgatgttttctataatatttcttttcatgttttgaatgttgatcacagtctactaatgatttagacacctgggcatgggtctcgcatgcagtataacaagccatggattaacacgtgtgc[141 bp omitted]tccactaaaaatactaaaattagccggatgtggtggcgggtgcctataatccagctatagagaggcagaggcaggagaattgcttgaacccagggggcagaggttgcagtgagccaagctccagcctggatgaaaaagcaaaactccgtttcaagaaaaaaaaaaaaaaaagagcccaatccaggtggctgttatattgcctcttgtttgtacacctagtgggctctttctcctccttcaaggcttaactcagacacctcctccaggaagcctttcatgaggtctctggttgtgctaaagttcttttcacttataacattgcattgaaatcagaaatcagctctaagtggaagttcccagcacagtctgggagttcaaatcccagatgtgtccctactagaccacgaagcctggccctaatgagccccaaacctcagagcctttcacctgaaaaatgcagacaagaagtggggacctcttgggtcacctcctcgctgggctgtttccactcctccaaacttaaagtcaagttctcacatgatagccagagtgagcctgttcaaacctaagccagctcacgtccctcctctgggcagtcctcccatgggtcctactgcactcagagtcaaaatcagagtcctcaccctggcccaggaaaccccagcatgatctgctcccattatctctctgacttcttctcccagccctctctccctttccctcctctctatgcccaccttggctcacacccatctcagggccttttacttggtgttccctctgcctggaacatttttttcttaggaatccacatggcttattcctctgcttcttcaggactctgctcaaacataacctccccaaagaggtcctccttgacccaccttacctgaaacgggtttaccccacccccagtccaaccccacagccctgtgcagttttcctcacagcccttaccaccactatatatacttgtcagtttgttgaccctctcctcactcaatcgtaagtttcatgagggcagcaacagcgtctgtttaatcactgctgagcccccgagtcctagagccttagagtcctagatttggttcacccagatccagaggcgaggattcaaggacagatagtctgtttgggaggtgcaaggaactcgagagtggggaagttaggcagagaaggcaggaaataataaaagctgtgttcccaagctggttaccatgggcaactggagcacagtcccattggggaactcaggccctggtgtggaatgactctgcagagttatcccacatagcagagagggagctggggaatttatataccaacgtgtcctggcattgtggagggctgctccctgatgtgctcattccccagcacttccagcctgctgcctccatgggcagagtaggctttggccaccagtgaaagtcctcaggcaacgggatgcaggtgctggccgttggaagtgggaagggcaaggggttggactgggggcactgggcacagaccaggctcttcaaacacattcatgggtgaattaatgaatgaatgaacacatgaaagaatggatgtctctatggtgggcagaagaaatgcccagcttttctgagtggactccactcttgtggccttgttccctgtttgcacagacagcctccaactaatgccactgaagacattcccagctgctatccggggagtcatccagagtgagctcaactattctgtgatcctgcagtgggtggtgacaatggaccctgagcctgtgctgagctggaccttcagtggggtgccctgtgggatgggagagaagctgttcatccgacggttgtcctgtgagcagctgggcacctacatgtgcatagccacaaacagcaagaaacagctggtctctgagcctgtaaccatctcgctgccaagtgagtcccccattccaccccaccccaccccacccaagagccctgcaccctctccagcctgtggcagcctctatgattccattaagccacctactatgagcagtcccctgtgagaccctttataggcaaaatgtcattccaatgttccatccacctggcggactgtggattattaggccactttcttcttctttcttctttcctcttcttcttcttttctttcttcttctttttctttcttctccttcttttcctcctcctcctcctccttcttcttccttcttcttctccttctccttcttctacttcttcttcttcttttttttttttttgatagagtcttgctcggtcacccaggctggagtacagtgctgtgatctcaactcactgcaacctctgcctcccaggttcaagtgattctcatgcctcagcctcctgagtagctgggattacaggcatgcaccaccacatctggcctatttttgtatttttaggagagacggggtttcactgtgttgtccaggctggtctcgaactcctgggctcgagtgatccacccaccttggcctcccaaactactgggattacagacatgagccacctcgcccagccaattaggccattttcagatgacaggctgaggctcaaagaggttaactatgatgaaagcccagcttaggatctggaccaggctacctgggtccttggctccaaccatttgcttgttacatgaacatgggaagcctctttgcctctctgagtctcagcacatacctacaaaaaatgcagatcaaaatctaaggagtgggccaggtgcagtggctcacacctgtaaccccagcactttgggaggctgaggcaggaggatcacttgagcccaggagttagagaccaacctggacaacatagtgagaccctgtctctaccaaaaaaaaaaaaaaaaaaaaaaactaaaaatttaatcaggcatggtaatgccacctgtagtcccagctgcaatgggaggatcacttgagcccaggagtttaaggctacagtgagctgtaatcgcaccactgcacaccagcctgagtgacagaggatgactgtctcaaaaaaaaaatcaccattgtcatcatctaaggagtggttcaaagcaatggctttggaatttgaatccctggctgtgtgactctgagccagtgccttgacttctctgtgcctcagtttcctcatctataacactgggaagataatagtgcctaccccagtgtgtagttgtgagcattcaatgagataagccggtgaatagcttaaaacaataatgtctagcactatcgaacactaatgagtgctcaataaccgtgagccaataacactgttgcaattagcattgtcattattaattgtagctattaccatatacagtcggtatatggagccctaggtggcaatcaaaatgacagcaagttgttgagatcagagaagtggtttgggacctggtcaaaactcagttcagtccctgttcccgtgccttcctggctgggtaacttagcgcaagtgacttcccctctctgagccccagtttcctcatgtgtataatggaggtaatcctatatacctcttcagggttgttataaggaacgaaaacaaggggtgactgagtttggcagaacaactgtcaggcagcaggtgccttgaatagcagctgttatggtgaatattgtttttagtgtgttattcatggagggacacatggtgatatggtttggctgtgtccccacccaaatctcatcctgaattgtagctctcataatccccatgtgtcatgagagggacccggtaggaggtaactgaatcatggggtcaagtttttcccatgctgttctcgtgatagtcaataagtctcacgagttctgatggttttacaaaaggcagttcccctgcacacattctcttgcctgccgccatgtaagacatgccttgctcctccttcaccttctgccatgattgtgaggcctccccagccatgtggaactgggagtccattaaacctccttttttttaataaagtacccagtctcaggtatttcttcatagcagtatgaaaatggactaccatggcttggagtgaactagaggtatgcagaggaactggccaggagagaagagagggagggtatttggggtaggaaagaatgcatgagtcaaggttcagagctgggacatggaaatggaatgcgtgatgggaatctcagcttggctgggtcccagagaaccacctcacctccctggccagggtccagtgggagcttcagggctgatgcactgggggaaaaaatgtaaatcttatatcacctagtgaccctgatattcagtgagaaggacaatacttccaagacctcctttgctcattcatcaactgcccaggaaatgtttatgagcacttgctgtgtggccagcccacacagctgggaacactctggtgaccaagacagctgcagccctgccttcacaagacttacagtccagtgtccacagacagtgatcaccagagtgggcagggctgggatgggggagcccagagagctatgagactcagcctaggagttaaggagggcttcctggaagaagggacacctgagctgagaattatgcttagctggccaggtacagtggctcattcctgtaatctcagcactttgggaggttgaggcgggtgggtcacttgaggctaggagtttgagaccacgctggccaacatggtgaagtagatggtgaagaagatggtgaaaccccatctctactaaaaatacaaaatttagctgggaatggtggcatgtgcctgtaatcccagctaccagggaggctgagacacaagaattactggaacccaggaggtggaggttgtagtgagctaagattgtgccactgcactccagcctggtgacagagggagactctgtctcaaaaaaaaaaaaaaaaggaattatgcaagccaagagagagagatggcattccagagagacagtgcagcatggacaggcctggaggcaagagagaaagaaagggatgagcttggaaaattgagtggagtccagggttgcatggctataaaggcagggcaatgagagagatgaggctggccaggtggcagggcctcgaaggctaaggtgagaaactgacttctgccccagggtgctgggaagccacagcagggttctgagcaggggaggaacagggtcaggtgtgagctttagaaagatcctcctggcttccatgtggtaggaaggtggatgggtgctggactagggcaggagagcagggaggagagggggccagagacctggaggatggaagagaaggatggattgaagagacacttgggagggggaatggcaggagggaggggtgcacagggagggcgggcagatggctcctccaatctcacccctccttggtccccagaacccatcatgcagcccacagaagcagagcccatggagccagaccccactctgtccctgtcaggaggctctgccatcgggctccttgcggctgggatcctgggagccggggcactgattgcaggcatgtgtttcatcatcatccagagcctaaggtacctctatccctcacccccgtccactgggcaacatccactcagcccccatggggcacagagctggctcaacaaggaaacagagatgaaaccaacacccccatcagggagggtgatagcgactcctgaggagcccatctgactcactggtttccaaaatgggatcacagcaacaaagagatagaagaggacactagagctgggctgtctggcttcaagtcccagctctgtaacttactagcagtgaggctgtgggcaagccactccccttctctgtgcctcagtttgcccatctgcaaaatggggatgataataatagcatctgactctctgggttgttgggttgggttgttgtgagtgaatttttctttttctttttttttttttttgagatggagtcttgttctgttgcccaggccggagtgcagtggtgcgatctcggctcactgcaacctctgcttgccaggttcaagcagttctcctgcctcagcctcctgagtagctgggattacaggtgcataccaccacgcctggctaatttttgtatatttagcagagacagggtttcgccatgttggtcaggctgatctcaaactcctgacctcatgatctgcctacctcagcttcccaaagttttgggattacaggcatgagccactgcacccgtccagtgagtgaatatttctaagaaacttaaagcagtgcctggaatgtggtaagtactatgttcgtcctctctacacatatctgcagtgaccgctctgtgccaggcactgaggataccgagggaagaaacagcagaaagaccctgccctcatggaacttgcatcctggtcggggacaccatcaagaaacacaatgaa[131 bp omitted]caagacatcttgtcatctctctcaaaatataaaaattagccaggcatggtggcatgcacttatagtcccagctactcaggaggctgagatgggaggatcacctgagcccaaggaagtctagactgcagtgagctaggatcatgccactgcactccacactggacacagagtgagaccctgagtcaaaaaagtaataataataaatcttttaaaaaagatagtatgttggatgagcgctaaggagaggagtgaggctgggaagcaggacaaagattgtggagtggggtggcatttaacgagtcagggaaggcctccctgggacagtgacatttgaacaaagggagggagtggggagccacgtgagggtctgaaggaatggcatatccagcagagggaacagcaagtgcaaaggccctgaggcaggattgcctggcatgttcaggaaatagtgaggagcccagggtggccagagtggtgtgaagaatgggcagagaagtaacatgtgggtcagagagggagtagggaggcaggggaaggcagctagacccttgcataaggccttgtaggctctctgagcacttggcttttgctctgagtgagatggaagccatggagggtctagtgcaagggaaggatggcatctgacttatatttgatcctatatgttggctagtactacaacgctattaatatcttaccatcagcaaggcatggtggcccacatctgtaatcctagcactttggaaggccaaggcaggaggatcacttgagcctaggagtttgagaccggcctgggcaacatagtgagaccccgtctctaccaaaactaaagttttttttttttaattagctgagtatggtagcacgtacctatagtcccaccacttgggaagctgaggtgggaggattgcttgagcccaggaatttgaggctgcagcgagcgatgatcgtgccaccacactccagcctgcttgacagagcaagaccctatttctaaaaattaaaaaaataatgtttttaaaaaacttgatcttaccatgtattgagcacctattatatgctttcttttttttttttttttttttgagacggggtctcactccattgccaggctggagtgcagtggtgcaatctcggctcactgcaacctccaccttctgggttgaagtgattctcctgcctcagcctcccaagtagctgggactacaggcgggcaccaccatgcccagccaatttttgtatttttagtagagacggagtttcaccatgttggccaggatggtcttgatctcttgacctcatgatctgcctgccttgcaaagtgctgggattacaagcataagccaccaagcattactctatttaatctccataagagctggggaggtgagggggctgtggtaggggtgaagatctcatttcagtccagagagtagtgatctgcccagggcccacagctggagagaaaggattcaagcctagactcctgcctgccactttgttctagctcctgtctacactgccttttccaccatcagtaactgtacagacctctgtaatctatgttgtgaggaagagaaatctgtaggtggtagtggtttagggagacattgtggaccagctgggaggaactggggccaggtctccatccatgagtcctgcacacaaccatctaggggcaagggagggccagcctgcagcctcggccacccagattgccttcatcattgtggcagctccgatgtcctggcccctcagcacgtaccaggtgctgaaagccccaactctcagggctaggtgctattattgtcgtcatttcccaagtgagtagagctaacgctcagaaaagctcattaacttgcccaaggacacacagcgaatgaatggctggccctgaatcaaaccctgatctaagtctacagaggggaaaggtgaggagtcaggctggcatgaaaatcctcacccaggcacctcaagtccctgccctcatgagcaggcaagaagggtcactttctgtcttccccgcccttgtggccaagacctatttagttgtgagcaacagactcctgggacaaggccaatgggggcatcagctggaaggagctagcctcatccaatcagctgtgaccttgcagatgaggccacgtgtcatggacatggctgccttgaccctcccagtgaggaggaacatttctcagaaaagaagtgtatatgggctaggcaggaaccccatgcatgcctaccatgcccaccaagggccaggagagatccccattgtttgtagttgaggagagggacctgaagccaggctacttatattcacatctcagctctgctgtacatgaccttgtggaatttgggggagccctttaacccctcagtggctcatctgtaaaacaggaatatggcagtgtgtggtgctcacaattgtaatcccagcactttgggaggctgaggcaggaggattgcttgagtccaggagtttgagaccagcctgggcagcatagcgagactcatgtctctacaaaaaaaaaaaaaggaaaagaaaaattcactgggcatgataacacatgcttgtggttccagctactcgaaaggctaaggtgggaggatcgtttgagtctgggagttcgaggtggcagtgagccattattgctctactgcactccagcctgggtgacagagtgagactctgtctcaataaacat[133 bp omitted]aaaaccccatctctactaaaaacacaaaaattaacaaggcatggtggtgcatgcctgtaatcccagctatttgggaggctgaggcaggagaatcatgccaagaccagctcagtcagggaaactctaacccagcggtgctagaggaattaaagacacagaaatatagaagtgtgaagtgggaaatcaggggtctcacagccttcagagctgagagcctcaaacagagatttacccacgtatttattaacattagcattgtttctatagattttagattaactaaaagtatcccttatgggaagcaaagggatgggctgaaataaaggcatgggtatggctacttatctgcagcaggagcatgtccttaaggcacagatcactcatgcggttgtttgtggtttaaaaacgcctttaagtggttttccgccctgggtgggcaaggtgttccttgccctcattccagtaaacccacaaccttccagcgtgggcgtcatggccatcatgaacatgtcacagtgccacagagatattgttcatggtcagtttcggggccagtttatggccaggttttgcgggggggcctgttggtgcaatttaagctaaacatccctttaggggaccaattaataatgattccataggaatcgttgtgcagcacctctgcctgttctgcaatgcaatcttcctaaacaagtatgttcattttttctggccaggttcaattttgttacagataggtttttgagggcagtatgcctcaattataggaggagatttgttatggtaaatactgagatcagaaagcacatgtaactgtgtcatagagtgattacatccaggcattattgccagccaagattgatgaatatgcctaataagtataattgttctctgtgtcagcccttctttaaggaatactcacggcaatggtgattaccactatcatagctaccattactcattctgagtggttgtcccgctttcctcaggttttcttccatcatctgtgacagcttcttgatctgtctccagctgggtggctgtgttcgacgggtgtttctcgtgacagttggggtcctcctcagcatcagcctcgacatggctgcaaccggggggtcctcaggatcctcccggagtctcttccttggcatctggctcatgctaaaatttcaggtgtcttgatggtatccaaatcagctgttcatgttggcctggagaaacacaagcataaccaacaccccaagttattattttacctacttcccaactttttgttattggatctctccaccaaaccaattgttctgcttctgtctttgcagctggtttctgtagatgctgttcagctgctgataacatctggcctttgggcaggctcaaaaaatttaaagttaataatgctagactcaattgtgtatgggctgtcccataatccctgtttctccctcttttttgtttttgtcatcagttgttcatctgtatgaaatcataactgagcattttcaattaactgtgtggaatgaaccacgtatgaagaatcagaaatcatattaataggcatatcaaaagcagtcaatacctcaattacacctacaagctccgctttctgagctgaagtatagggcgtctggaaaactttacctttcaagccagaataagaagctgtactattactagacccatctgtaaaacaatgaaaatgcttagcaggctacagtatgtaaatgcaaaccgttcacagtcttgctcagctaaggggatagtaaagaaacagtcttttaaatctatgactattaaaggccagttttaagtcctctgaagcctccagtttctctttactcagcggccactgttctaaacattttaaaggtataggttctggaagcttaacaatggctgccatcaaaaatgatattctaatctttggcgggaactttgtctttccgcttgaagcggttctttcaaaccttgcaaatttttttctagtctcatgctagggacatgccccatttcatgcatcatatgttgattttgaaggatatataattgttctggagttagaacttgtgctccccattgttgtaataaatctttcccccacaaagttatagatacagaagttataattggttgaatagtcccaagttgtccatctggcccttcaaaatgcaaaatatagctactttgatatacttcaggggctttaccaactccaactatgttaaattgagtgggttgaattggccacgtggacgaccagtgctgtagagaaatgattgaaatgtccgctcctgtatctgccaagcctttaaatttctttccctgaatagttatttcacaggtggaatgtttatcagtaatttgatttacccaataagctgctttgccttgtttctttgtgcttccaaatcctcctgttcatttaatttcacttttccccattcccacatacggcacaatcaggagctgtgctgtgcgctctcctggctctgctttccagggaacagaagtagatgtaacaatttgaatttcctcattgtaatctgaatcaatgactcctgtatgtgtttgtaccccttttaaacttaaactagaccttcctaaaagtaatcctattgtccccgctaacaagggtccacagactcctgttgggaccttttacgggggttccccaggcagaaggctcacagcttttgtgcagcataaatctactgcggcactaccggctgtggcgggggacagacattgtacgggtgtgagggaatggcctgagctggaaatgccccagtttggaatggggcccaggacaggcccctcatggcatttcctgaaatcaggttcccttctttatcaaacttagagtgacactgattagcccagtgttttccttttttacatgttggacatatttcagactcagcagttttcttttttcccctatctggcagctgacttgctgattatttctacattcttttttagtatgaatagcttgtttaaattctttgagtaatttacaaggaaaaggctcaaatgtagctataatatttccctgttgatctggggggtgtattctaacagggaactgccaagcctctaaatcaccttctcttctagcttgctggattcctgcctgaatagaactgacagcagtcgctccaggcgctgctcgaacagtcactggggcaactacttttcgcccagcgtcctccagaaaagaaagaactggagggtcaggccactatttatggccagttttggggccagtttatggccagattttggggggcatgttcccaacagaatctcttgaacctgggaggcggaagttgcagtaagccaaaatagcgccactgtactccagcctgggcaacagaaccagactgtctccaaaaaaaagaaaaaagaaaaaaaaaaaaaaacccagggatgtgattatacttccctccaaagacaggagtgaggattaagtaaaatggtgggagtcatgagctgtgaacagtgcctggaatgtgatgagccttcaataaacctcagccatgtgatgatgatgattgtattagtttgctccagctgctgtaacaaaaatgctacagaccgggggggcttaaacaacaaaaatttattttctcacagtctggatgctggaagtccaagatcaaggtggcagccagtttgatgtcccatagtgcccctctccatggcttgcagaaggccaccttctcactgtgtcctcacgtgaccttttctctatgctcatccctggggtctcttcctcttcttgtaaggataccagtcttattggatcaggaccccactcttatgatctcatttaaccttactgtgtctgaagaatctatctccaaatatagtcacattggagggttaggactacatattaatttggggaacggataataattcagtcgatgattcttattctctctctctctctctctctctctctgtctctctctctctctccactgcaggactgacaggcagagaataggaatatgcagctgaaatgtgggcaactctcctgtcagctgaagaggtaataccaggaagggtgtgaaggaaatcctaggtttgggaacagaaagaagttcttgggcagagactccatatgtgatttcctccctcctggttccctggtcatttgtctgtgagatgttcccctcctgtggagagctccaggagctgcttttctcttcttttgccaactgccagcaccccatctgcccagctcatcaaattcctggaagctgcctaaacaagcagtctatatttcataaacctcttgggctccatgcaaaagaaactcactgacgtagctcaggaaaaaataaaatgaacagtttaatataaggacctatgaaatttttcagcaatccataggtgtgagtcagcatttgctttgtaacaaactgcctccccaaaattcactggcttgaaacaacagccatttatttagcttgcaatttcatgggtcatccatttgggctgggctcagctgggtagttctggtctctgccaggctcgctcctgcatctggggtcagttgacagattgcccaggggctgtctggactaggatagcctcatagctgggacaactggcctctccttcatgttgtctctcatcctccagcagggtgacccaagcttgttcacatggcagaggcaggattccaagagtaacagcagaaacttcaaggccccttaagtctcaagctcaaaatggacatgccatcacttctgccacagaaaggacttcattggccaaagttacatgactggccaaattcaagggatggggaagttgactccacctcttgctaagaagggaaaaatctgtggccatttttgcaatctacgaagaaatgtggaagtacacacagctctctctgccagcctcccccacacacacacttcacccccaccccaagcccttacaattcctttcctcctgcatgtggaatttacagttctctgtctctctctgcagatgggtgctttgtacctctctatccacgtggaaaaaaaaacccatcccatagcttccaagtctacaacatctctgttcaagggaacaacccaacgtaaccagactccctttgccctgtttctgaaacacctgaagaaaacatctgatgggttgactcggtgccatccttggtcccatcgccgtgacacgttgtgcaagcaaagcatcagaggctcatccctgtctgtgggagctcagtgctcagaaaacaggggggaggttttaccttggaaattggccagaccccaaaatatgtcttttacacatgctgctttttttttctctttttcaaaaagaaccaaaaaataaattaaaacaccaccacttctgaatggtttctcatgaagcctctcttcctgagagtgggagaggcatgtttgcaaataagatcaacctttgagctttgcactgttcaagtttaatacctctccataggaggatcctgacagatagcaggcacagggcacacaagtatggctgaaactcctctgggggatatatctcacatttgaggaaaattcggtgcttctgtgaccaacacagaaccacctaacatggcattctgcttagcaataatagtagcagaactgagtccaagtcttgtctgttgagggctctccatgtgccagccactgactatttaccttacatgattaatgtgtcatagcaggccaggcgcagtggctcacacctgtaatcccaccactttgggaggccaaggcaggtggctcacctgaggtcaggagttcaagaccagcctggccaacatagtgaaaccccatctctactaaaaatacaaaaattggccggatgtgggggcacatgcctataatcccagctaccggggaggctcaggcaggagaaccacttgaacccaggaggcagaggtttcagtgagccgagatcatggccactgtgctccagcctgggtgagggagtgacagtatctcaaaaataaaataaaataagtaagagatgttagccaggcacggtgactcacgcctgtaatcccagcattttgggaggccaaggcgggcagatcacctgaggtcaggaattcaagaccagcatggcaacatggtgaaaccctgtcccttgttatcacacgaatggggatgtggcttgtgtgctgcctaatcttgcctagaactaggtgtacctgcgttcttttgcttatggctttacccttggttaccctaattccctattctcctgcctcaagaggtgaccacagcagccctgggcctgccctcctagggcttatagtacagtgagggagacagacctgttcccagtgatgacccagagtcatcactctcctctgggaggccaggggggagtcttaatggagactggaggatccaggagggcttcctggtgagggaggggtcagctgtacta[137 bp omitted]cagtgaaaccctgtctctactaaaaatacaaaaaattagctggcgtggtggcaggagcctgtagtcccagctactcgggaggctgaggcagaagaatggcgtgaacccgggaggtggagcttgcagtgagccaagatcgttaccactgcactgcagcctgggcaacagagcgagactccgtctcaaaaaaaaaaataaataaataaaagagcagccaggtcttctggttggagttggtgtttaagaaaaataaaatttaaaaattaaaatttttttggccgggcacagtggctcacagctgtaatcctagcactttgggaggccgaggcagatggattgactgagctgagctcaggagttcaagaccagcctggccaacatggcgaaaccttgtctgctaaaaatgcaaaaaaaattagccaggcgtggtggtgcgggcctgtaatcccagctacttgggaggctgaagcatgagaatcgcttgaacccgggaggcagaggttgcagtgaaccaagattgtgccactgtacttcagcctgggcagcagagcaagactctgccaaaaataaaaaaattttaaaaattgtttaaagagcagccacgtctccatagtggtaattgtcaggcatcgcaccaaagagctttaatgcgttcttctcaaacagtcctcccacttcagcctgccaaagtgctgagatttcaggtttgagccactgtgccatgctatgcccatttttcagataaagaatcataagccccaggagacatcaataataattg[135 bp omitted]cctccacctcaagtgattcagcctcccaagtagctgggattacaggtgtgcacgactaccacccagctaatttttgtgtttttagtacagatggggtttcaccatgttggccaggctggtcttgaactcctgacctcaaaagtgtgggggaaagaaagagagatcagactgttactgtgtctatgtagaaaaaggaagacataagaaactccattttgatctgtactaagaaaaattcttctgccttgagatgctgttaatctgtaaccctagccccaaccctgtgctcgcagaaacgtgtgctgtattgactcaaggtttaatggatttagggctgtgcaggatgtgctttggtaaaaatgtgtttgcaggcagtatgcttggtaaaagtcattgccattctccagtctcaagtaaccagggacaccatacactgcggaaggcagcagggacctctgcccaagaaaacctgggtattgtccaagatttcccccactgagacagcctgagagatggcctcgtgggaagggaaagacctgaccgtcccccagcccgacacccataaaaggtctgtgctgaggaggattagtgaaagaggaaggcctctctgcagttgagataagaggagggcatctgtctgctgctcgtccctgggaatggaatatctcggtgtaaaacccgatcgtacattctatttactgagataggagaaaactgccttatggctggaggtgagacacactggcagcaatactgctctttactgcactgagatatttgtgtaaagtcaaacataaatctggcctacgtgcacatccaggcacagctcctttccttaaatttatctatgacaccgagtcctttgctcacgttttcctgctgaccctctccccaccattaccctatagtcctgccacatccccctcaccgagatagtagggatagtgatcaataaatactgagggaactcagagaccagtgccggtgcaggtcctcacttgctgagcaccggtcccctgggcccacttttcttcctctatactttgtctctgtgtcttatttcttttctcagtctctcgtctccaccttgtgagaaatactcagaggtgtggaggggcaggcccccttcaaaatgatccacccacctcagcctcccaaagtgctgggattacaggcatgagccaccatgcccagccacatataacttatttctaaataacttatttaactaacaccacatgattttatgaccccctattttatggatgagaaaaaagaggcaagagaagcgataccagttgcttaggattcccagctaccaattagtggaagcagaatttgaaccaagggagtctctggagccctcgttcccaatctccttttcttcctctccatgtctttctttctccccctgctcccaggcctcctacatcacacccttctggacaaagcttcacatctgacattttcttttttggggtggacagagtcttactctgtcaccgaggctggagggccgtggcgcaatcatggctcatggcagcctcaaactcctgggcttgagggatcctccagcctcagcctcccaagtagctgggactatgggcatgtgccaccacacctggctaattttttaattttttgtagaaatacagggggtgggggcatatctgaaaattttaaaccttccctgactgccgtgagcatttctgggtagaagccactccacgaccttactttgctggcatgagtgctggacagcaatttggcaacatcctctagaccacaaatgtgcatggcctttggcccagcaaatcagcttctgggaataaatatgacagatactgttacatacatgggaaatgccatggacatgatgacccagggaagcacagtttgcaagtacaaaagggctggaaacacccaaaaagcccatcccctgaagacagtttcaaaaatgacggtgcattcatgtaatggaatagtacacatttgtgaatgaatgaatgaggtagctcaatatatctgcctatgggaaaatcaccaagatatgttgctaagtgaaaaacagaaagatacagaataatgctaccattttattttttaatgggagagggaagaataaggaaatggattcatatttgcttaattacacaagcttcctgatgatcctttt[137 bp omitted]catggtgaaaccccatctctactaaaaacacaaaaaaattagctgggtatggtggtgcaggcctgtaattccagctacttgggaggctgaggcgcaagaatcacttaagcctgggaggcggaggctgccgtgagccgagatcacgccattgcactccagcttgggagacagagcaagactgtctcaaaacaaacaaacacacacaaaaaataagatgcccattggagatctccattcactattttatcagatgatatttcagcacttgagtgaagaaaatgtctacaactggtccaaacactcaaggaatttagactcttgacagagaaacacacagaagcaagcagatatgccccgaaccaaacttgctttttcttctaagcctgcttcttcggagcagcctctgaccctccagggccctgagaggagtccctggagccacaggagcttgggagcccagagaagtgggggaatcccagatggtgacagcatcatccagaggaggaacataacgatggccacagattcccaatttggaaataactcagcaaaacaacactgacagaaaattcagagatttccaagagactagcctccctgtttccatttagaaattcacctacatacatccagggtgagagaccccaagcatcagatgtgtcatacacaagcatcagatccaagttagagagggcacccggggacagaaacctccaagccagccaaaagccaaaggaaggattttacagaaagatacaggaatgtggggccaggcacagtggctcatgcctgcaatcctagcactttgggaggccgaggtgggaggatcgcttgcggccaggaattcaaggccagcctgagcaacatagcgagatcctatctctacaacaaatttaaaaactagctgggtgtgatcacatatgcctgtggtcccaactacccaggaggctgaggcaggagttgagcccaggaggtggaggctgcaatgagcaatgatggcgccacttcactccagcctcagtgaaatagtgagaccctgtctaaaaataataataaaaataaaaaacatataaagatgtcagagcacagggaccagagctgttagtcggcctcatggagaccctggccaggacagccacctctggggaccaggaagtctctcagtttctgtctctgagggtttggctctctgagtctctctgtcacctctcatttctctctcatctccctctgtctatgctgtgtctctatctctttcaatctctctgtctctgtctcccagcccttatctctgagtgtgtctgtttctctctcatttctctctctctctctctctctttctctctctctctttctctctctctctttctctctcccccctccctcctcccctctccctactgcaggctggtccataacccttatcttccccagacctgatggagttctggtattaatctgtttatggtctgtttccctccactagaacacggtcttcattaaaggcagagatttttgtctgtcttattttctgctgtatacccagtgcctgggatactggctggatcaataaatatatgctgaatgaagaatgaatgaatgaccattctcatgaacattattatttgatgccaactgtaaagcaacaataataataattgtcactgccactgctgctattgttggtatatcagctttttatttagtacaaactatatccccgaaattgagctaggcagtttcttgtttaagttttacagaccacgctgtgaggtaagtactgttagtatgcccttttttctttctttttgagacagagtctcactctgtcgcccaggctggagtgcagaggcccgatcttggctcactgcaacctctgcctcccgggtacaagtgattttcctgtcttagcctccccagtagctgggattacaggcatgtgccaccatgccggctaatttttgtatttttagtaaagatgggtttttg[135 bp omitted]agacaggtctggctctgccacccaagctgtagtgtagtggcgcaatggtagctcactgaagcctctaactcctgggttcacacagtcctcctgcctcagcctcccaaaatgctggaattcaggcctgagccaccgcgccctactatgcccatttttcagataaagaatctgagggccctcgaggagaaaccacttgcccaacatgagccctggtcttgtctgaccccaaagcccatgggaagtttaggctgcgtggaaggacagcctggtgggctcaggatctgtcccatcacgagttggaacctcagctctgccactcggcaaccgcgagccgttagtaagttgctgaatctctccgtgtgcctccgtttcctcacctggaatgtgggcgacctcacacaggaagccgcctcttctagtgggcaccgacggagcgagcgcgcgtctgcagcgggactgagcgccgggagagacctgcgcaggcgcaggcgcgcggggagggccagcctgggtggcccaccccgcgcctggcgggactggccgccaactcccctccgctccagtcacttgtctggagcttgaagaagtgggtattccccttcccaccccaggcactggaggagcggccccccggggattccaggacctgagctccgggagctggactcgcagcgaccgcggcagagcgagcgggcgccgggaagcgaggagacgcccgcgggaggcccagctgctcggagcaactggcatggcccgagccatggccgccgcgtggccgctgctgctggtggcgctactggtgctgtcctggccacccccaggaaccggtgagtgacccccgcgcagtccggtggcccctgtctggctcccagctccgcatccaggccgggtactcgcccccttgggttcccgaagatgacggccccgcccggcgccacccaccccccatctctgccccggggttggaaggaacacggtgcgagggtgcgagggcaggaccctcctcttggccacccggagagcggtcggagttgggtacagaaattcctcgaaattggcagcaacacgggtcgggcacaagaccctcctctgggcccctcggaaaggggatggagttgggtgaggaaatttcccaaaaaggcaagtgaatcccggaaaatcagcagatggtgacgcatgccggattaccttacccaggttcctgctcagcatacccaggccataacccagcagcgtgctggcaggctgggtctggacggaggggatggttgatgttggggaggaggacagtgggtgacacttgacaccattacccctctgacccccaatgtctgactccaggggcctggccattcattcattctttcattcttttttttttttttttgagacagtctcactccatcacccaggctggagtgcagtgtcctgctctcggctcactgcagcctcctcctcccgagttcaagcgattctcctgcttcagcctcccgagtagctcggattacagacatgtgccactatgcctggctaatatttttgtatttttagtagatacaggatttcaccatgttggccaggctggtctcaaactcctgataaatatatatattatatattattattatatattacatattatagtaatatataataaaaatatataatatatattatagtaatatataatatataataaaatatataatatatattatagtaatatataatatataataaaatatataatatatattatagtaatatataatatattataatatattatatatattattataatatataatatgtatattatatattatatatattattataatatataatatgtatattatatattatatatattattataatatataatatgtattatgtattatataattgataatatataataatatatttcttaataaatatatattaaatatattatatatttataacatatattatttatataataaataatatatattttattatacatttaaagagtaaatagataacatattttattatttatttatatgttttgtgtatatatatatatatatatatatatatatagtgcgtgtgtgcgtgtatgtgtgtgtgtgtatgagagagacaaggtcttgctttgttgcccaggctggagtgcagtggtacaatcccggctcattgcaaactcgacttcccaggctcaagcgatcctctcactgtggcttctggagtagctgggattataggtgctcacctggctaattttttttgtatttttggtagagacagggtttcgctatgctgcccaggctggttgcagccaagcacagtggctcatgcctgtaatcccaacactttgggaggctgtggtgggaggatcacttgagcttaggaattcaaaaccagcctgggcaatatggcaagaccccatctctacaaaaataattaactaaataaaaatttaaaaataaaaaagaatgcataggaccatgtttattagtgtcaataagcgctgtcacattttgaggacctactatgtgctagggcccttagcagaaagatttttatataggacctgggggattagaggtcagtctctgaccgcccaagttcaaatcccacctctgccactaaacctctgtatgacttggaggacactatactctgtgtcagtttccctgtctgtaaaatgatgttaacagtagtgcttgcctcaggggggctatttgaggattaaatgccaagatatatgtgaagcacccagaatagcccctgatctgtgtcagcaccctgtgagtgtccactgttctaagtctcattttacaaactaggaaaaagaatcagagaggttaagtaaccggcctgaagctccacagcagaaaactgaagggacccaaaactcctgggctataattgccttcctctcgtgcctcaatcccccacattcttccaaccaggacccacccagagtaataatgcagtgtttcatggatttgaagacccaagatttctccccgttttctacattggggttattctaacccctaatggcaagttgtgctataaatgacaacagtcatggtatgtgaaacctacgacactggtgcgatgaaaaagttctgggccaggtgcggtggctcatacctgtaatcccagcactttgggaggccgtagtgggaggatcacttgaggtcaggagttcaagaccagcctggccaacatggtgaaaccccatctctgctaaaaacaaaaatacaaaaaattagccaggtgtggtggtgggagcctgtcatcccagctacgcggaaagctgaggcaggagaaccgcttgaaccccagaggcagagcttgcagtgagcagagatcgcgccactgcactccccctgggcgacagagagagactccgtctcaaaaaaaaaagagaagaaaagaaaaagttctggcgctatatagtagtaacggttgcacaatatcgtgaaatgtacatagtgccactgaactgtatgctttaaatgacttaaatggtaaatttagttttttaaccacaatatttaccacaattttttaaatcagtgatgttgagattcagggaaatacggtaataatagaagaaatacggtaataaatagccaaagtgaaggagcacggccaagttgcagaccatcccagacgcccttaccctcctcgcctgccatggccccaactagtgccccagttccccctccccccacaccccacggtccaccggggatccagggccccagcgtgcaagtgcacgcccaggtgcccgggctcctggagcccctccctatctagtccaagaacgccccgggtctgacaccttctcttcggttctccgcaggggacgtcgtcgtgcaggcgcccacccaggtgcccggcttcttgggcgactccgtgacgctgccctgctacctacaggtgcccaacatggaggtgacgcatgtgtcacagctgacttgggcgcggcatggtgaatctggcagcatggccgtcttccaccaaacgcagggccccagctattcggagtccaaacggctggaattcgtggcagccagactgggcgcggagctgcggaatgcctcgctgaggatgttcgggttgcgcgtagaggatgaaggcaactacacctgcctgttcgtcacgttcccgcagggcagcaggagcgtggatatctggctccgagtgcttggtgagcagggggttttggggaggctgaatgaaaggcagagacttggtgggaggatcagggaagttggcaaagagcggggaggcctgggagggagggagattccctccacagcagatcccctggggacaaaaggagggggcagcgcaatgatgtggggtggggtggggggaggtgagtggggggaggggctgcagggcaggaagaaagcagagatctcagggagtaaggacccccaagcctgggatcagaaagccctgagggaggaggaggggtatattggaaagggagctgggaggggactgggaaggaagggaggaggcctgggtggcctcttctgggtccctcctttcctcatctgtaaaagggttggtgacaacagcatcacccttggaaagctgtcctgagtgtcatcactgcctaggaaagagtctgtctgcccccttggactgtgtacccatgagggcagaaccggggctattttgatcactgctgggccccagcactttccaccaaacaatatttattgagcacttattatgtgccattctaagagctttacctgcatattctaattgcctgtgattccatcattatcacctgttgacagacaaggaaactgaggcacagacttgcccaagaccaaagctgcagccttagggcagcggcgcttcaccgctggcccatgtgagccccttagagctgtcggttactgttactttatctggtgaagaaggagaaagttgaaacagacagacaggaaagcaaggatcctgatacccaaaagaggaggggatcatgctttcattttcatgagctccatgaagccttcctcttggaacttgagcaagaagtctctgtgcctcagtttcctcatctgtgggatagggatcaccatgaggattcaaaaaaactgaccctttttttttttttgagatagtttagttctgtcgcccaggctggagtgcagtggtgtgatcatagtaggtcctcactgcagcctggaactcctgggctcaagggatgttcctaccctccctgtagctggaattacaggaatgtgccaccatgcccaacttgttttctgttttgttttgttttgttttgttttcttttctttttaagcttatgtgccaagaactattccaagcctgtgcatgagaaactcatgaaatgtcaagggcttggaactgtgcctagcacacaacacccaaccaaaggcagctgttgtcactccagcaagcctgggattctgggtatcatggtttaggatgagggtaaaacagaaacagtgagtcaagttaaggagaaatcttcggtaaataatataggtaatgatggggaaggaagttccaggtttgggaatcaccaggatgatgattaagagatggtcaaggtggttttggagtcagacagactttatgtgaaagcccagctctgctgcttacagctgtgtgaccatgggcaagtcacttcccttctcaacttcagggctcaggcttcctctcctccactgagccccagaccaggataaccccctttgggtttcccctttccagccctgccctctccgagtcatcactgcctaggaaagagtccgtctgcccccttggactgtgtacccatgagggcagaaccagggctattttggtcactgctgggctccagcactttccaccaaacaatatttattgagcgcttattatataccattctaagagctttacctgcatattctcattgcctgtgatcccatcactatcccctgtcaacagacaaggaaactgaggcacagacttgcccaagaccacacagctgctcagggacacagctgggatttaaaccatgccattctgtatcttttttttttttttttttttgagacagaatctcactctgtcgcccaggctggagagcagtgacacaatctcagctcactgcaacctccgcctcccgagttcaagcaattctctggtctcagcctcccaagtaactgggattactggcgtgtgccaccataccctggctaatttttaatagagacagtttctccatgttggccaggctggtctcgaactcctgaccccaagtgatccacccacctcagccccccaaagttctgggattataggcgtgagccaccccgcccagcaaccatgccatcctgtacccttaatgaatgcccccttctgccacggaggggttcattgaatgacttgttgcttttgttcctcttcccagccaagccccagaacacagctgaggttcagaaggtccagctcactggagagccagtgcccatggcccgctgcgtctccacagggggtcgcccgccagcccaaatcacctggcactcagacctgggcgggatgcccaatacgagccaggtgccagggttcctgtctggcacagtcactgtcaccagcctctggatattggtgccctcaagccaggtggacggcaagaatgtgacctgcaaggtggagcacgagagctttgagaagcctcagctgctgactgtgaacctcaccgtgtactgtgagtgtgcccaagtcagcgatggcaagaacccctgccgggctgcccccaccactgtctacactgactccccaaggcactgtaggcattgcttccatcatctgcaccggctcccctgactcctgtctacacgacccacccccattgtctgcaccagctcccctgggccgtaaacaacactgtccctattgtctacaccagtttacttgggccatagtcaatgctggtacccagactgtctgccctggctcctctagcggctgtctgcacggatacctgacactctgttgactcccttgagcacagtctacactgcccctaaactgcctacacccatttccccaggcaagtatccacaatgaccctccccacattgctacactggttcttctggccacgatcaacactgcctcccttattgtctacacccactcccttgtccttttctttctttcctttttttttttttttttttgaaatagagtctcactctgttacccaggctgcagtacagtggcatgttctcggctcactgtaacctctgcctcccaaattcaggtggttctcctacctcagcctcccaaatagctgggattaaaggtgcacaccaccacacctggctaatttttgtatttttagtagagacagggtttcatcatgttggccaggctggtttcgaactcctgacctcaggtgatcggcctgcctcagcctcccaaagtatgctggaattataggcatgagccactgtgcccggctttttgttttgttttgtttttcctttggacagggtctcgctctgtcacccaggctggagtgtaggggcatgatcatggttcctacagcctcacccttccaggctcaagcaatccttctccctcagcctcccaagtaactgggactacaggtgcagccaccatgcccggctaattttacagtttttttctagagagagttttgctgtgttgcccaggctggtctcaaactcctaggcttaagtgatcctcccgcctcagtctcccgaagtgctgagattacaggcgtgagccactgcacctggccccttgtccattttctacactgccttaccattgtctacactggctctcctgggccacagacagcactaaccccattgtctacaccacctattttggccaccagctgtggggtgttttcactgtctcccatagtgtctacactggctcctatgaccactgtctatgtaaacaccccactttttctacactggttctcctaggcactctctaaagtgccccctgacactgtctacactgactccctggagaactgtctgcattcacctcccacattgtatcgaccagttcccctgagccacgatcaactgtctccgccgggtgctagttgcattgatcttctcacattgtttgtgctggctcccctaagcagtgtctgcagagtcccccagtgtagtctccatgttcctctgcccaatattgtctacactggctcatctacaggctatccagtctcaccccacatcaccacactggcctccttgtgttctgtctgcacagccccctgacagcatctgtcctgattctcctgcacagcgttacctccaccagctccctcatggcatcatcgacattgacacccacacatttatctccactgacagccccaggactctctaaccagtgctgtctaacagaaatagcatgcaagctgcatataggatttta[144 bp omitted]gaaactctgtcttcactaaaaaatacaaaaattagccaggcacggtggcgggtgcctgtaatcccagctactcgggagactgaggcaggagaatcacttgaacctgggaggcggagattgcaatgagcgagattacgccattgcactccagcctgggcagcagagcaaaactccatctcaaaaacaagaaaagaaagagatgaaatttatttgtttatttatttatctatttatttatttgagacggggtcttactctgtcacccagactggagtgcagtggcacagctccctgcagcctcaacctcctgggcttaagtgatcctcccacctcagcctcagtctcctgagtagctgggactacaggcgtgtgacaccatgcctagctaatttttgtttttgtttttgtttttgtttttttgttttgtgatgaagtcttgctctgtcacccaggctagagtgcagtggcacgatctcaactcactgcagcctccgcctctcgggttcaagtgattctcctgcctcagcctcccgagtagctgggattacaagccctggccacagtgcccagctaatttttgtatttgtggtagagacgggatttcaccatgttggccaggctggtctcaaactcctgacctcgtgatccacccaccttggcctcccaaattgctgggattacagacgtgagccaccgcacccggcctatttttattttttctggagacaggatctccctatgttgcccaggctggtctcaaactcctgggctcaagtgatcctcctgcctcaacctcccaaggtactgggattacaggcatgagccactgtgcctggccaaaattaatttttaataattgcctttacttaacccaatatacctaaaatattatttcaacttgtaattgtttttttaaaattattcttgagatctttcccatttattttgtcctagtaaagcctttgaaatctggtgtgtatttcggcctggctatatttcgagtgctcagtagtcacatgtggccagtaggtgccatattggacagcacagatctagactaagctcccacatcatctacactggctcatccaaatactgtctacacacatacacagagcctgtcttaatttcgtcagctcccggggacacactgtatatgtgggggtgatctcacccccaccaccacattttcaacactggcccgacaatatagcatctgctgtaatattccaacaccctgtctacactgaacccatcagtaatatccacacaagctcttctagacatcattcatactgttcctcccaccattgtctatactgcttactccccgccaggcaattggtacacagattccctcaggtactgtctatactggagtccctcaacactgtcactgggtctgagcgaggaggagatctacactgactcctacccctcgcccccgaataaaaccctgtcccattggcctgcccccaaggacattgaaaggtcttcgctgtcaatcacgtatgggatggctgagcagcagcctagagcagggttatctgggactctttcctgcaggacttgtcagaaccttgaatacactgctgtgtgttgtgagtggtcattgcctatgagtgagaaaaggaggaggcattttcctgcaggacacccaagacatgcctggtccaggctacccaggaaagctagtggagaaaagcagctcctcagaagccttctccatgtccccactgaccaaggactcctaggcttctgctctctgtggcaccccatctacctagactcctcctaggcctctccagctcccgctgttttccaaatatccccgggccttttcctgcagtgtcgtgaatcccgcgtagccccaggccccccaaagcctcccagtctctgaacctctgtatccatttcctgcagaccccccagaggtatccatctctggctatgataacaactggtaccttggccagaatgaggccaccctgacctgcgatgctcgcagcaacccagagcccacaggctataattggagcacgtgagtcctgggtctcagggaggaggggctgggggtctggatttctagcactgagggaggaggggctgggggcctggactcctgggactgagggagaaggggctgggggcccggacccctgggtctgagggacgagaggctgggagcccggactcctgggtctgagggaagaggggctgggggtctggacccctgggactgagagaggaggggctgggcctggacccctgggtctgagggaggaggggctggggggtctggacccctgggtctgagggaggagaagctgggagcctggacccctgggtctgaggcaggacagactggggcctggactcctggtctaagagaggagggagattcagaaaagagaaaaagaggaggttgacttcgggcccccagtggggggcatctctgttttgacatctctgttttgcggttgaggcgtttagcaggtggttgaatcctggctggtggatgcacctgctttttggggtgtgcctgctctgtgcccggtacttcccccgaatcccatgtgaccccatgctgtgcacagtcagcagctgttgccctgcccaggttaaagaccagccacgagagggcagaagcggcccttgaatcagcgctcggctccaaagctggtcctccgcctcttggccaagcttgtctaacctgcaggccacatcatttgtaaactttcttaaaacattatgagactttttttttgcgaatttttttagctcattagctattgttagtgttagtgtattttatgtatggcccaggacagttcttcttcttccaatgtggcccggggaagccaaaagattggacacccccactctagactgtaaccacctcaccgtcaccttgtgtaacctacttggttatctctggatggagcaagtactatatatccccattgtctagatgagaaagttgaggctcacagcaataagatttccccagattcacactgaggctgagatcaagagcaaggtaagaaaaaggcaaagagataatacataattttataatacataattttacataaattacataattttactgaaccgccctttttttttaaagaaggggctctgttgccgaggctggagtgcagtggcgtgatcatagctcactgcagcctggacctccctgggctcaggtgatcctcccacctcagcctcctgagtagctgggactacaggcacacgccaccacactcagctaattttgttgtattttttttgcagagacagggttttgccacattgcccaggctggtctgcaactcctgggctcaagcaatcaacccacctcagcctcctaaagtgctgggattacaggcgtgagccacctcgcccagccttaggtctttttccttattacaaaaataacttgtgtccactgtagaaatatcaaacaatttagttatgagcaaaaagaagaaagtagtgcctatagttcaagtgtacccagccacctccagaaatacccagtgaccccttattatacatcctgtcttttttctctctgtttctaaacaaagactggaattatgctgtacatataattttgaaccttttcgtctgtcttgtgaatacctttccatgtcaaagcacatagatccacaactccattttcccccacgttgtattaggaagactgtcaaacatacagaaaaatcataggaattttccagtgaacacttaagattccaccacgtggattcccctgctaacattttactgtgcttgctttatcacgtttctgtgattccttcagtccctctattcatccatcaatcatattatgcatttcagagcacccccagctctcctgcttttttttttttttttttttttttgaggcagggcctcactctgttgctcaggctgtagtgccgtggcacaatcacagctcactgcagccttgaattcctgggctcaagcgatcctccagcttcagcctcccagatagctgggactacaggcacacaccaccacgcctggctaacctggccccttttttagtgttgctgggattccaccactttaaaaaaaaaattcaaagaatagagacaggatctcactatgttgcccaggctggtcttgaactcctgtactcaagcagtcatctcacctgggcctcccaaagggcagggaagggattccaacatatgtggatgtcatcagttatttaaccagtccctagtagaggacacagatgtcattttccattttcaactctgcaaatgccatggtggtgtccatccccactggtcacttgtcagcagttgtccgtggaaggaattgccggtcaaaggttttcaactggtgtgatggtgcctttactgtcctgcctcaaagcaccgcaattcaggctcttgagccagatagctgcgtttgcatcccagctctgcggagcacccaaagcctgatgcttccatctcctccacctctgttcattaaaccagtgttccttgactacttactgtgtgccgggtgcaattaaccaacatacgttggtcgataaaacagaccaaatttcctccccatatagagcttccattctagtggtgaaagaaacaagaagcaagataaagtgtgtagtgtgtgtgcaatggtgataaataccatggagaagacaaagcagagaagggaatgggactgggcgccatgactcatacctgtaatcccagcactttgggaggcagagatgggaggatcacttgaggctaggagttcaagaccagcctggccaacatggcgaaaccccatctctaccaaaaaagatacaaaaattggccgggtgtggtggcatgcacctgtagtcccagctactcaggaggctgaggtgggaagattccatgcacccaggaggtggaggttgcagtgagtcaagatggtgccactgcactccagcctgggtgacagagtgagacgctgtctcaaaaaaataataattaaataaattaaagagaaggggatgggaagggtgatcatcacagttgaaatagggtggccaagtgaggtgttactaaggtgacatcccagcagaggcctgaaggagatgagggtgagctctgcgggtgcctagggggaaagcattccagcagagggaacagcatgggcaaacccatttctatccatcagtccctgcataagcaaacaccctggacacctaactggagagtttgaggaccaacaaagaggccactgtggatgcagaggcgggagcaaaggggagagtaatggaaaacgtgggcagaggtagcaggggccagatcacgtggggcctgtgacaccagaagacttcggtttaactctgagccaggctaggcccccagagggtactgagctgaggtatgggaactgacttagggttcacaggcgacctctggtggccatgtggggaacagacgagggggcgagggcagaaacggagcccagcgtggaggcggctgctgggggccgggatgcacagcgccagagcagggaggtaccgtggaagccctgaggagaggtgggattctggatggatcttaaggcggggccgacatgattggctaatgggttgggtgtgggcatgagaggaagggaagagttggggggcctccagagttgctctccgcttatgctatagagggcgtgagggtttctgggcacgtagtgcgtgctcaatcactgtcactccggacctgcagcagaggccacctcctcacctttctgtctctcccaggaccatgggtcccctgccaccctttgctgtggcccagggcgcccagctcctgatccgtcctgtggacaaaccaatcaacacaactttaatctgcaacgtcaccaatgccctaggagctcgccaggcagaactgaccgtccaggtcaaaggtgaggaactccctgggtgggaagaacagggaccaaaggaagaggtcgaggcagggttccctgtctaatgctctctggctcccatccttctcctaagccttctcacaaaaggaccagtggggccagctttactcccctgttaactccatacctatatcactggtaccgttgttcagctgcctggatacactccctccacacacacaggttgggatagatgtggaatccctctctctcagggactcaggcctttccaaatatattaggcagacctctatcaattgcaattgacagaaacacaaagtagtctaagcaaaaaaaaccaaacaaaacaggactttattgaaaattcaccttcaggtatggttagatccaggggctccaaccttgtaacccaggaacttttattttatacatctcttgtctctgcttttcgttatactggctttattctcaggcaggctctgaagcaagatggccctcggcagggacaggctcacattctaccagaatggcaacagcaggagaaaaaacataccactttcagtaactgtagccatagtcccagggctggctctcattggcccagcttaggccacagcccacctatgaaccaatcatagcagccagggagaatggaatattctgattggccaggcctgtgtcaaagtcccattctgggcaccagagggtgggatccattccacctgaattaaatagactgaggcagtggagtggtggctccctaaggaaattcaagatgccatttcaagaatgagggataaaccccaagagtttccttacctaaatacctgtttccttctctttcagagggacctcccagtgagcactcaggcatgtcccgtaacgccatcatcttcctggttctgggaatcctggtttttctgatcctgctggggatcgggatttatttctattggtccaaatgttcccgtgaggtcctttggcactgtcatctgtgtccctcgagtgagcatcaccagagctgccgtaattgagcacctactacgggctctgtgctgagtccttccagtgtgcctctcactgaatcctcaccccactgccatgaggtttcccccatttgactgatgagggtgcagagccagggagccttgttcactggttcattgattacatttacaaatattatttacagagtgggagaagagcgtatagggtcttaatgccatggtagggactttggaatttaattcaggtgatgtgggagtccctgccagatggatggagggtgaaataatgcttaagccctcagccttactccatctgccttgttcaggagtgactcctaggaggaggtggcaggaactggcacctctgatcctcagctctaaaagggtctgatgctttcacacctcaagagatttgcacaggccgttcccctgcctggagcaccctcccatggctccttctggagaagtgtgccagctcattctgtaatcagaggaacgatgctttgctgagcactgtctacatgccactttgtatgtataaccccctcgattttaatttttaattttttttattatttatgtatttatttatttatttttgagacaggctctcactgtcgcccaggctggagtgcagtggtgcgatctcggctcactgtagccttcacctcccaggttcaagcgattctcatgcctcagcctcccaaggagcggggattacaggcacgcactactatgcccagcaatttttgtatttttaggagagacagcgtttcgccatgttggccaggctggtctcaaacccctggtctcctgtgatccacccgcctcagcctcccaaagtgctgggattacaggcatgagccaccacacctggcctgtacaatctccttgaatgcccacaaccacccagcaaagtggttctcccgtgagccccatgttacagaggaggaagtatttgctttgagagatgaagttacctgccaatggtcaaacagctggacatggttgttggggagaagaagccagatctttgactaccaagcttttccttcaaccactaaacaaagctgctcccttacaacccaggcggatactgcctcgtccaggaagccctccctgacccccaagcatgagccaagcatccactaggctctcccactccagccttgcccattctgggtcatcaccgtgggggacttgtttgtcatccccagtggactgtgagccccaagatagcagacctgaggctgtcactgtcatgactgtgtccccaggaccgcctaccactgggccgggcataaaagaggcactcgaggaagtgtttgctgagtgattcaatgtgtcagctccagagccagactgcctgtatctgggccctaaagctactgcttgattagtgatgtcaccataggcaaatagcttaagctgtatgactcagtttcctcatctgtaaaatggggtgatggtacctaataatacagtagagcacttaacacagtaggtggcacatggtaagccacatactgagtatgtatttgctatgattgttattgctattattactattattgttattattaacataaactgcacaagagcaggctttttgtttgtttgtttgtgttttgttttgagacaagatcttgctctgttgcccagactggagtagtgcagtgatgtgatcttggctcactgcagcctcaacctcccaggctcaggtgattctcccacctcagcctctcgagtagctgggattataggcgtgcactcccacgcctggctaattttttatatttttagtagagatggagtttcgttgtgttgcccaagctggtctcaaactcctagactccagcaatccgcccacctcagcctcccagagtgctggaattataggtgtgagccaccacgcctggccaagagcaggcatttttatctgttttgttcacagctgtgtccccagcacctagaatgtacctggcacaaagtagacattcaccatttgctgaataatactactatttgctaaataaacccctgttgaatagtctaggaaactgaacacagagaggttaagtcacttgtccaagttcacacagctcctaaaggacagagatggaatttgaacccatccatctggttccagagccaggctcgatatttatggatatttcataaccaagtgaataactggatggctaaatccttagaaagcacaccctccatccctgtctgacacacgtgtataccattaagggaaatggcacccccatgtaatagcagaggcagaacttgacattttcagggccctgacacccaggcatgtcttcttcccatgcttcccagcattattccttcctgacgacttcccctcctatttccccaggtacagagcatgccagcgcctcagctaatggggtaagtgcagtgttggagctaaggagggtgtggggtctgcacgaactacagaccagacgtcttcagatgcccacggcccggcctcaggagcctgggtcttttctcctggtgcctcgagcagcatttcccaacccttcctgctgggcggaatcccctgtagagtttgctaagacgcagccccagacagtctggtctgtgatggggccagggaatctgcattttaatatccgctctctcccccctgccccacgccccttcaattccacccatggccacaccttgagaagcactgccctggcttccagggagagaggaggggacgggcctgcagttctttgcacatggggcttcagtgggaagatgtttgattttgttcaaaagagccccaaggctaaaatttgaaaaccctcttctagcatgtctcctattcagctgtgagcagagagaacagctcttcccaggatccacagacagagggcacaaggtgacagcgtcgggactgagaggggagagagactggagctggcaaggacgtgggcctccagagttggacccgaccccaatggatgaagaccccctccaaagagaccagcctccctccctgtgccagacctcaaaacgacgggggcaggtgcaagttcataggtctccaagaccaccctcctttcatttgctagaaggactcactagactcaggaaagctgttaggctcacagttacagtttattacagtaaaaggacagagattaagatcagcaaagggaggaggtgcacagcacacgttccacgacagatgaggcgacggcttccatctgccctctcccagtggagccatataggcagcacctgattctcacagcaacatgtgacaacatgcaagaagtactgccaatactgccaaccagagcagctcactcgagatctttgtgtccagagttttttgtttgtcttgagacagggtctggctctgttggcagactagagtacagtggtgagatcacagttcattgcagccttgacttctcaacgccaagtcatcctcccacctcagcctcctgagtagctatgactacaggtatgtgccaccacgtctggctaatctttttattatttgtaaagtcgaggtttccctgtgttgcccaggctggtcttgaactcttggctccaagtgatacttctgccttggcctcccaaagtgctgaattaagcagctcaccatccacacggctgacctcatacatcaagccaataccgtgtggcccaagacccccaccataaatcacatcattagcatgaaccacccagagtggcccaagactccaagatcagctaccaggcaggatattccaagggcttagagatgaatgcccaggagctgaggataaagggcccgatctttctttgggcaaggttaagcctttactgcatagcagaccacacagaagggtgtgggccaccagagaattttggtaaaaatttggcctctggccttgagcttctaaatctctgtatccgtcagatctctgtggttacaagaaacagccactgaccctggtcaccagaggctgcaattcaggccgcaagcagctgcctggggggtgtccaaggagcagagaaaactactagatgtgaacttgaagaaggttgtcagctgcagccactttctgccagcatctgcagccactttctgccagcatctgcagccagcaagctgggactggcaggaaataacccacaaaagaagcaaatgcaatttccaacacaagggggaagggatgcagggggaggcagcgctgcagttgctcaggacacgctcctataggaccaagatggatgcgacccaagacccaggaggcccagctgctcagtgcaactgacaagttaaaaaggtctatgatcttgagggcagacagcagaattcctcttataaagaaaactgtttgggaaaatacgttgagggagagaagaccttgggccaagatgctaaatgggaatgcaaagcttgagctgctctgcaagagaaaataagcaggacagaggatttgctctggacagagatggaagagccgggaacagagaagtgtggggaagagataggaaccagcaggatggcaggggcaaagggctcaagggtgaggaggccagtgggaccccacagagttggggagataaaggaacattggttgctttggtggcacgtaagctccttgtctgtctccagcacccagaatctcattaaagcttatttattgtacctccagcggctgtgtgcaatggggtcttttgtggaaatcaaggagcagacaggtttcatgtgtactgtcaccacgtgggatggaaccagaggcatggaagcaagacgctaaatgaagagggccataagggctgggattcccaggcaccttaggaacagcttgtctttttttttttcctctccaaaaaaaatgtttaagggacggtgtctcctgtcacccaggctggagtgcaatggcacgatcatagctcattgcagcctctaactccggggctcaagcaatcctcccacctcagcctaccaagtagctgtgaccacagctgcccctcaccatgctaagctaatttttttaattagatagtacataaacgtcccaaaattagaagataaaaagacatgagggatccattctaatttgtgtttggagtgtaatggtccagctccattcttctgcacatggatatccagttttacacaacactgtgaatgtaatgaatgccactgaatcatacactcaaaaatagctaaaatggcaaattgtctgttatctctttttaaccaccatttttgaaaattaattataccaaaaaaccattgaatagtgcactttatttatttatttatttgtttatttatttatttattttagaaataagagtctcactttgttgcccaggctggagtgcagtggcgtgatcatggctcattgcagcctcgacctgctgggctcgggctatccttccatctcagcctcccgagtagctgggactataggtgggcgccaccccacctggctaaatctctttttaacttttgtagagataggcatctcgctatgttgcctaggctgggctggaactcctgggctcaagtgctcctcctgccttggcctcccaaagcgctaggattacagatgtgagccaccgcgcccaccctgaaccttactttttttgctcagtttctggtaattcagagaatgcctcctgagttgttctacacccacctcatattccatgggagggctgtacagggcttttttaacgaggcctctaaggacaggcatttgtatcctttccagcctttcactattacaatgttgtagtgaataactttacacactgtcatttattttacttttttttttttttattttagagaaaggaatcttgccatcttgcccaggctggtctcaaattcctgggcccaaacaatcctcccgccttggcctcctaaagtactgggatttataggcataagccaccgtgcctggccaatgcacactgtcatttagctcatgttaacacctgagtgtaggacacactcctggaggtggaattgctgggccaaagagtatgtttcttgtcattgtgatagatattgacaaatgaaccctcacagaagttgtgctgagttctgttcccaccagcgacgtaggcgatgacctttttctggagggagggggcatccttggagtccacagagccaggaatggagagtgggcccagaattttggtataggtgttgtataaacttatagtaaggttaagaaaaccgcaactatccttatcagagacttggcggggggcagggtatgatggagatcataaggaggctaaaacactccacaccctccctctgcattgctcctgcacgggagtcgggaatcttttcaggttgatacgatctcaccttgaggagctgtgaggtcccagaagcctctgggttgcagattgcttggggtgaaaatg[136 bp omitted]aaaccgtgtctctacaaaaaaaattagccaggtgtggtggtgcatgcttgtaatcccagctactcagaaggctgaggtgggagaatcccttgaacccgggaagtggaggctggagtaaaccatgatcgagttactgcactccagcctgggtgacaagagtgagactctgtctccaaaaaaaaaaaaaaaaaaaaaaaaactggattgcctggctctactccgggcacagcatgcaggcccagttctgctgctctgctgtttgttctgctttcctccacatattggcatcaccctctggtgccaagatggctgctgcattccaggcatcacatccagactcagacccagagaagctgcccatccctacctgggtgagcctttgtaggaacgagaaaccgcatccagcagcagaaacctcacccagcagcgtcttttccggtctcattcaccagcgccgcccaccgctcaaccaatccctggccaaaagaatgggaccgcctggaaggctggaccaaacaggacctgccctctggggctggggagaggcccagatgaaggctgcaggacaggatggactcctagacctctgttaccagcagtgactacctctgtctgggtggttggaacatgtttgaattttattctaagtactgtctacaagttctgcaataaaccttgactcttcttttaataatgcaaaaggaatcgaagtgattgtttgaaagggagaggaagaaagagagagggagggagggaagaatggagggaggcagggaaggagacagagagagtagaatccagccaccggaaaatccagaatagctggctttgcttaatccatgcctggaaataactgctgggtttgcaacaacttctctcccggagacagaccaaggaaactacaaaactgcaggaaggattgaagggccgggcacagtggctcacgcctgtaatcccaacactttgggaggccgaggtggattggatcacctgagatcaggagttcgagaccagcctggccaacatggtgaaacctcgtctctgctagaaatacaaaaataagccgggcgtggtggcgtgcgcctatagtcccagctactcgggaggctgaggcaagagaatcgcttgaacctgggaggtggaggttgcagtgagctgagatcgtgccactgcactccagcttgggcgacagagtgagaatctgtcaggtggattctgagggtactctgaccccacgaacccagcatgaaatcttccaggcattaaggaacattgaggatgtggaggattggaaatccctccagggaaaatacacttctcttgagcagggtcacgaggggtgggggcaatgtgggaggtggggcaaatccaaagacaaggtcaacagcaataataataataacaatgacaggcatttgttgcttgttggctgggcctcttgcatacagttctcccaacatccctgtgaggtggtgatgcttatccccattctccaggggaggaggctgaggcccagagaggtgaagtcgtgtgccacaaaataccccagccatatggtggtagaaccaagttttcagccagactcaccagctcacagcagagctgccctggactctacagccattcagtgtatagctgggccactccatcattcaaggcagttcaacgtcaagattcctgatttgcctcaacctggggcctctagaagataccatcacccccaacaagctgaagacgtgtgtccggaacactcagacacacacaaagtgctatggatacaccacaccccgacctagctgtctcttcctgatggacctcactgggtagaaatgcctggcaccgcctgcctcagatccctaggtcagctctcactccccaatagaagtttctgagatgatgatgaaaacgttctccatctgtgctgtccaatggagtagccactgatcacttgaggctagtgagcacttgaaggtggctagtttgaggaactgcattttttaatgcatttaattttagttactttgaatatatatacacatatatacatttatatatacatattcatacacatacattttacatatattttatatgtatatgtaatatatatataaattatatatgtatatatttttatatataaatatatattatatatttataaatatataaatatataatatatattatatagatatataaatataaatatatattatatatataaatatataatatatattatataaatatatataaattatatatttatatatataatatataaattatataaattatatatatttatatataatatataaatatatataaattatataatttatatattatatataaattatatattttatatataatatatacaatatatataaattatatataatatataaatatatataaattatatataatatataaaatatatataaattatatataatatataaaatatatataaattatataaatctatataaatatatactatattataaatatagtatatatttatatagatttatattatttatatagtatatattatatatttatatgtttatgtatatataaatatataatatataaatatatttatatattatatatttatataatattttatataatatgttatatatttttatataatatattatatatatttatatgctatattatatagtatattatatataatatattttatatattatatatatatttatataatatttatatattatatttatataatatgtttatatattattatatttatataatatgtttatatattattatatttatataatatgtttatatattattatatttatataatatgtttataatatatataatatatttatataatatgtttatatattatatatataatatatttatataatatgtttatatattatatatataatatatttatatattattatatatattttataatatataatatatataatataatatatatattatatatattatatatattatatattagttataatataaatatataatatatgtatataattatataattatatacatattatatatgtatataattatataattatatacacatattatatatgtatataattatataattatatacacatattatatatgtatataattatataattatatacatatattatatattataatatattatatattatattatatattataatatgtatatataaatataatatataatataatataatataatatatataatataatatataattatatataatatatattatatataaaataatatatatatattcagtttttttttttggagatggagtcttgctctgttgcccaggccggagtgcagtggcacaatcttggctcactataacctccacctcccaggttcaagtgattctcctgcctcagcctcccgagtagctgggattacaggcatgcgccaccacggccagctaatgtttgcatttttagtagagacagggtttcatcatgttgcccgggctggtcttgaactcctgacctcaagtgatctgcctgcctctgcctcccaaagtgctaggactacaggcatgagccaccacgcctggcctattcagtatatttttttgagacatggtctcactctgtcacccaggctggagtgcagtgtcatgatcaaagttcactgcagccttgacctcccaggttcaacaatcctcctgcctcagccttctgagtaactggaactatagttgaaagccaccaagcctacctaattttttaaatttgttttgtgtaaagttggggtcctactatgttgcccagcctggtctccaattcctaggctcaagcaatcttcccacctcagcctctcagaggggtaggattacaagtgtgggtcacctgtgcctccctaaatttatatttaaatagccacatatgactaatagctatgatattaaacagcataacactagaccctccattatccaagctctgttgatccaaccaacagagcacatttgatctctcctacctcccagcctcacacacacaggccccacaccctccttcctggctccactcacccaagatattgcaacctcctcaatacaccttgatgactatctcagcctccacatccttgcattgctatttatgctgcctggtgcacctcatgctgcctcaccccatcatctgcctcatttctactcttactccaggtctcagctcagatgccccctcccccaggaagccctccctagccgtcaggttgaatgaggtgtgtctccttgggctctcccagactcctgggctcctccatcccagccctgatcactctggatcataattgtgtgagaggggtctgcccccccaaaccctacaggattgtgtgccctactgtggacagagggcagagcagaggtggtctcaatcatcactgtgtcaccaacatcacccagcacacacaactgggcactgggaatgtgtgctggaatgaatggaggatgctttttaaaaactaggctaagccaggtatggtgagtcacatctgtaatcccagtactttgggaggctaaggtgggaggatcacttgagcccaggagttcaacaccagcctggggcaacatagtgagatcccatctctacaaaacatataaaaattgaccagggatggtagcacacaactgtggtcccagctactcaggaggctgagacgggaggattgcttgagcccaggagttggaggctgcagtgagcaatgatcatgcaactatactccagcctgggcaacagagcgagaccctgtcttaaaaaaaaaaaaaaagaataacacacttggaataaacatgatccaaaaaagtacaaaacatacactctggggctgggtgcagtggctcatgcctatactcctagtactttgggaggccgaggcaggaggatcatctgaggtcaggagtttgagaccagcctggccaacatggcaaaaccccatctctactaaaaatacaaaaattagccaggcatggtgacgcatgcctgtaatcccagctactcagaaggctgaggcagaagaatcacttgaacctgggaggcggaggttgcagtaaactgagattgtgccactgtactccagcctgggtgacacagcatctaaaaaagaaaccaatccaaaaactacaaaatattcttgcaattataggtgacatatttaaatggtaagacaaccaatgttcatgaatggaaagacagagcaagaccctgtctcaagaaaaaaaaaaaaaaaaaaaaaaaaaaaaaacaggctgagcgcggtggctcacacctgtaatcccagcactttgggaggccaaggtgggcagatcacctgaggtcaggagttcaagaccagcctgaccaacatggagaaaccctgtctctactaaaactacaaaagtagccgggcgtggtggcgcatgcctgcatttccagctactccctgaggtgggaggatcgcttgaacccaggtggcagaggttgcggtgaactgagattgcgccattgcactccagcctgggcaacaagagcgaaactccatctcaaaagaaaaaaaaagaaaaacacgaggctaagagcttttttttttttttgagacgaagtctcgctctgtcacccaggctggaatgcagtggcgcgatctcggctccctgcaacccctgcctcccaagttcaagtgattctcctgcctcagcctctccagttgctgggattacaggtgcccaccaccacgcctgactaacttttgtatttttagtagagacagggtttcaccatgttggccagg[131 bp omitted]tctgtctattggcagacttgcctcttttcctgggcctctgtttccacatctgtgcaatgggaacagttatttatggtggctgctgaatgaggcagtgtgtgtttgaacaaacccaggggaattgttcaaacagaggctgttatgactattgctacagtgactgctgttgtagtcacgctgagtgagaaaaagaggttgaagagggtcaggggaggagtcctgggaagttccccagtcaccctgaaaaactggttcaacctctgtctgtgctcccatcccagggagtataggtggagcctccagagcccatggacagggcatgctggggctgggccagccccagcggtgtctctaaggcacccctgggatccccactgagctggcctacttcagacagccagggcccacccctctggcccccttagtgtccagctcgtggccccttggcatttccacaagacgccaagatggagattcccatggggacccagggctgcttctcaaagagcctcctgctctcaggtaaggaggaaatagaccctaaaggccaaggggagaaatggggactcagcccagagattgaagtttcctcttagaagtagggaaagattacctgagaggatgaaattagaataagatgggggaggggcaacagaatcacagcctcattgccattttatctatggaattttctataatgttaggaccatgaaggcaggaatttatgtatgtttggttccctgctatatctccagtgtctagaaattgaaggaagtttagatgtattacatatagttggtattatagcttatatattacatatgcctataagtattggttgaataaatgaatgaatgaatgaattcagagagtccatgtgtttagaagcaggccacacagcatctcaaggtagaaaaacctctggatcaacaggatggcaaatctgtggtaaccatgcctgtgttcccactcctgcacccagggcagacatcactaatcaatcccagcattgtttccaatgagcagcactcagagtccttgctccccgctgaagatctgtatctagagaggagcatgccatggtccctggcaacacccctgatctcagcccttccctgtaacttcccacagcctcaatcctggtcctctggatgctccaaggctcccaggcagctctctacatccagaagattccagagcagcctcaaaagaaccaggaccttctcctgtcagtccagggtgtcccagacaccttccaggacttcaactggtacctgggggaggagacgtacggaggcacgaggctatttacctacatccctgggatacaacggcctcagagggatggcagtgccatgggacagcgagacatcgtgggcttccccaatggttccatgctgctgcgccgcgcccagcctacagacagtggcacctaccaagtagccattaccatcaactctgaatggactatgaaggccaagactgaggtccaggtagctggtaagtgttagggtctggggatgaggtgaggaagctaatgagccctgagcagctaccatgcaccaggtgctgtgcaaacaccatttcatttggtcctctcatttattcacttgacacatattgagcatctactgtgtaccaatccccagagatagtctttaaccctcacatgcattaactaataaaatatctatgaaatgcccgccttgtgcctgacactggagaatgcaccatctcatttacctttcacatgcactaacattaaccaaatttttatcgagcacttactgtatgcctggttgtgaggaatgcatccctcaatctttatgtttataaagcgagtatttactgatgaatccactcggggcaaagtgtgagggaaagggtggtgggcaataatgacagctggcatttcttgggtgatcgttaagagccaggcaccatcttaaacattttccctaaagcatagtttctcagcttcagcactactgatgttttgtattggccagttcttactagtagagggtttgtgcattgcagagatttcagcagcaccccggcctctactcactaggtaccagtagcagcttcctagtcatgccaaccaaaaatgtcttcagatattaccaaatgtctccaccctgggataagaatcacccctggttgagaaccattactctatatttactcatttttaccttaaaacaactccatgaggccagcgccattattgtctccattttacagattgaaaaatggaggcacgcagtggttatgacttgctgagtaaagaatacgaaccagaatgatgtgacatgggaaaggaggtcatcagggagacctcactcaagaagtgaccttagaggagagaccagaagaaggtgattgagggagggaggtgctgtggccccttgccatttccacaggacacagatccccttagaatttatatgttgaaatcctaacctccaagatgatggtattaaaaggtggggcttgggcctggcacggtggcttacacctgtaatcccagcactttggaaggctgaagtgggtggatcacctgaggtcaggagttcgagatcaccctggccaacatggtaaaaccccgtctctgctaaaaatacaaaaattagctgggcatggtggtagatgcctgtaatgccagccacttgggaggcaggagaatcacttgaacccaggaggcagaggttgcagtgaaccgagatcatgccactgcactccagcctgggcaacagagcaagactccatctcaaaaaaaaaaaaagtggggcttgtgggaggtgattagatcatgagggtacagcacttgtaaatagattgtatgcccttatttttttttttttcaatttaaaagcaagattgtggagacagggtcttactgatattgctcaggctggtctcaaactcctggcctcaagcaatccttccaccttggcctcccagtgctgggattacaagaataagccaccatgcccagtctcagctcactgtaacctccacctcctgggctcaagcgatcctcccacctcagcttcccatgtagctgggactgtaggcgcatgccatcacacccagctaattttttttatttattggtagagactgggtttca[142 bp omitted]aaaaattttacagaaatggatgaaataggcaaaagtcaactcaacatatgcattaatttgattacacaaatctgcataaaatgacactctagtccggttggagataacagtccttacttcacttgtggagcctgaagtgacttctccccacatttccggggttcccaggtcacaggtgccccctttggaagctgcacagcatggtcattaaggagttcaggtggcctgggtatgatcccagcactgcacttattgtgagccatcaagcaagtcaatttactgttccatgcctcagtttccttatctgtaaaatggcatagagcttacttctttgttggatcattcagagaacagcgtgtgtgtgtgtgtgtgtgtgtgtgtgtgtgtgtgtgtgtatttcaaacttcataacaaccctaagaactaggtattcatattatcctcatttcacagacgaaccaagtcacagagagattgagtaatttgcccaaggccacaccgccagtgggcagcattaggatcccatagtctatgagcttagctgccaagacgggttgggatagaacagatgtccagcttgagagtaaagctgggaggtcagagggtaagagccaggtaggcgtggtcttaattctagcaagtccagtttaagaatcctccaagtcccctacatctcctgcaaaacacagcccagaacctcatccttctgctgaagggattcaggtatcatcaaccgaagtgagaaaaagcaaagcagattgggtctgggctcggtggccacgtctgtaatcccaacactttgggagaccaaggcagtagaactacttgagtccaggaatttgagaccagcctaagtaatttagtgacaccccttctttacaaaaaatttaaaaattagccaggagtggtagtgtgtgcctgtagtcccagctacttgggggactgaggtgggaggatggcttaagccgaggagttggaggctgcagtgaaccgtgatcatgccactgcattccagcctgggcaacagagtgagacgctgtttcaaaaaaagaaaaaaaaaaatcagtttgatggggtagggttggggagcatgtcagcaagcagattttggatgtgctgaggatcgtatgaaatcctagggaagcagcaacatcgagatataggacagctaaggagttccatctgggacatgttgaaattttttttttaatagagatagggtctcactatgttgcccaggctggtcttgaactcctgggctcaagtgatcctcccccatcggcctcccaaattgctgggattacaggtgtgagcaccacgcccagcccgctgggacatgttggattttatgtgccacccagatggttggatactcagatctgaaaagcaggagaaagctctgggctggaaataggaaactgcacctcagttctccatgcagtcactgatatagtcggtgagggactgggggagccctcaggagacatcgcacagtcccccctctctctttctttctctcacccctcagaaaagaataaggagctgcccagtacacacctgcccaccaacgctgggatcctggcggccaccatcattggatctcttgctgccggggcccttctcatcagctgcattgcctatctcctggtgacaaggaactggaggggccagagccacaggtacagggtccccaagtgtccctctcctgtctgctcccactgtcttctcaagccccatggattcttccacaagtcacatcatccggctcatacacaatctcatcaaatcttggaactcctggggtgaaaagaatctttctatcctgtattaaacagaattctgcattgcaagggacagaaaacctattcttaaactgacttaccaaaaagaaggaattttagtcagggtctcgctctgtcacccaggctggagtgcagtggcacaatcacgactcactgcagcctcaacttccccggactcaggtgagtctttcacctcagcctcccaggtagctgagactacaggtgtgcaccaccaagcctggctaattttttttatttttgtagagatggggttttgcccaggctggtctcgaactcctgggctcaagtgatcctccagctttggcctcccaaagtgctgagaatacaggcatgagccactgttccctgcccaaaaaacaaggaattgtttaatactacataacttattcaggtaggctgcatccaggggctcaatgttctcaaatgactcctttatatactcgtcaactctgtatttttcttcggtggcttcattctcaggcaggctctcccctgttgccacaagatcactcccagggggcccaggctcatactccactggtttagccattcctagcaaggagaccaccttgttcctggtagttccaacaagagccccaagtctacctctcattggcttaactcagatcacatgacttttcatgaaccaatcactgtggccaggggttggtggccagggaaagctctgattggccaaagttgggctatttgtgcagccccagagactgggctagatccaactccgtttaatcaagtggattgagagtgtagaccggctctccaaaggaaaacaaaactggttgctattgtcaaagaaggggagtgggcagcagcaggcacagctatcagatgctacctacttgtatggagagagagagagagagagagagaggagagagaggagagagagacagtcctgtttcccccagggagagtctattcgtgaaaaattcctttcttatgacatcagcgtcttcagaactttgtctcttgaaattgattctgaactgattgtagataagatgtctaatttttctgccactcaccagttcccagaatatgaaagcagcaattttgtctcctttctcaactcttccttatgtgccatggattctgttttcttcttcttcttttttttttttgagacagagtcttgctgcagtgtagtggcgcaatcttggctcactgcaacctccacctccgggactcaagcaattctcgtgcctcagcctcccaagtagctgagactacaggcgtgcaccacaacgcccggctaattttttgtattttagtagagatggggtttcaccatgttgccctggatggtctcaaactcctgatctcaggcaatccgccagcctcggcctcccaaagtgctggaattacaggcatgagccactgcgcctggcctatttctttttcttttttaaagagacagggtcttgctttatcacccaggctggagtgcagtggcatgatcatagtttactgcagcctcagactcctgggctcaagtgatcctcccacctcagcctcctgggtaactgggaccacaggcctgtgctaccacacctggctaattatctgtattattattttttgtagagatggggtcttgctatgttgcccaagctgacctcaaactcctggccttaagcggtccttctgcctcagcctcccaaagtgctcgaattacaggcatgcatcaccatgcctagcttattttttactttttgtaaaaataagatctccctgtgttgccctggctgtcttgaattgctgggctcaagccatcctcccatctcagccccccaagtagctgggactacaggagtgcaccatttccaagcttttttttcttcttcttcttgttttgctcttgtcgcccaggctggaatccagtggcgcgatctcggctcactgcaacttccgcctcaggggttcaagcgattttcctgcctc[134 bp omitted]tggcctcccaaagtgttgggattacaggcatgagccactgagcccaattactatttttttactcaaaaccgcacacacaccttccaccccctcccccctctccattttccttcatagggaaggatgttgctctctgatattctactgtcaatgctttattccaattttcttcccctctctttccaccctagactgcctgctccgaggggccagggatctctgtccatcttgtgctcggctgtatccccagtgccttcagtgacgcccagcacatggttggtgcttgtaaatacttatttagtgaactaacaaacttgctatagcggtgtcaagagtacttttgttttcagagtcaaagtctcactctgttgccaaggttggggtgcagtggtgcgatcgtagctcaccgtagcctcgacctccctggttcaaactatcctcccacccgagtctcccaagtagctgggaccccaggtgtgcaccaccacacctggctaatttttgtaatttttgtagagacgggatctcactttgtgagtcaggcaggtctcaaactcctggcctcaaaaaagtctcctaccttggtctcccaatgtgctgggagtatagtcatgagccatttcacttggttccagtgtacttttaaaattaagggtattcaggacgggtgcagtggctcatgcctgtaatcccagcactttgggaggccaaggcaggtggatcacttgaggtcaggagttcgagaccaacctgatgaacatggtgaaaccc[217 bp omitted]gaggcag[153 bp omitted]atcccagctacttgggaggctgaggcaggagaatcgcttgaacccaggaggcggaggttgcagtgagctgagatcacgccattgcactccagcctgggcaacagagcgagactctgtctcaaaaaattaaaaaataaaaaataaataagggtattcaaatgaatctatgtaaagagaaatattaaggaaatcataagacaggtggatgaagcaggatcatttaggtgatctctgtaaatggtgatgtctggggaacactattcattggcataaggtggtggctagggaaactgagggattgcggatgaggattatggaagaaaagtctgggatagttcaggcctcatcctagctcactctgaaggagagaccatgtggctttcagggacctggtgggatttccagcttctcttaagtctctctccccccgcctgagtgtctctctatcctaatatcaattccctctatgtgtccccaggatggcgaccacagagaagccagaattgggccctgctcatgatgctggtaaggcgggagccccagatctcactacctagccctcctctcagctcctcctttctcccctatagccacaagcccgcttattctccctcactcagagacctcccaatgcacctgccccgagacctctctggggccccctgaactcacccacataatctgagcgcatcggcacccaccccaaacctgctttttctcttcttctcagtggctagcatccccatcccatcatgcaagtggatcccatccacctccacaggccactaccagcctcctagaccccccacacccagctcctcactggtctcccagcctccagacccctccaacccatcccaggacaaggtctttctaaaattctgatcatgttactcctctgctcaaaggccctccatggctcccctgtgcccttgggacaaagtttagtctccttaacatggttctcaaggcccttcacaagacagatcaaacacagtttctgaaacacagctggctctctcaccagacctctgcactcaccctctcctgccttagcttcactcacttctctctactatctcagatgccccctcctccaggaagccctcactgagtcctaggctacttaggcaccccgtcttgggctcccacccgcccccagtcccccgactccagccctaaacactccaggttgtcactctggagactggtctgcgtcccccactggactgtaagtcctggaagggcaggcctgggactgtcgtggtcagcactgtgtccccagcactgggtttggctagaagaagcgtttgcacaaatgttagttgaataaataaataaatgaatgtcaacaggcagtcagagtggcctgtggggcccatgtgtcagctggtacctcccctggcctctgtttcaggtgacaacaacatctatgaagtgatgccctctccagtcctcctggtgtcccccatcagtgacacaaggtccataaacccagcccgggtgagtcccgtccccagcctctcccctgaagccaatgctaacaggcgcctcctctctgagctggctgtggtcctctgggccatcttgacaccaggtttgggaatctcaactctctatatattgttccctgtttttaaaaatcctaaggaaaagagactggaaggaaacagcacaacagaagcagcatttgtctccggggtgtggaggctggtgggtgggttttatcttcttttcttttatacttgtctgtgttttctgcactgagcagccactacctttataatggggaggttttatatatatataacgaaaggtttataaaaatgagtcatttaggctgggcgtggtggctcacgcctataattctagcactttgggaagcca[134 bp omitted]gaggaaggagaatcgcttgaacccaggaggtggaggttgcagtaagccgaggtcatgccactgcactccagcctgcacgacaggagcgagactccatcccaaaaaaaaaaaaagttatttagattaaataaaaagagaaacttagctgggcatgatggctctacacctgtaaatcccaacactttgggaggccaaggtgggaggattgcttgaggccgggagtttgagaccagcctggggaacatagctagaccccatctctacaaaaatttagctaggcatggtggtgtgcacctatagtcacagctaccagggaggctgaggagggaggatcacttgagcccaggagtttgaggctgcagcgagtggtgattgcacaactgcactctggcctgggtgacagagcaagatcctgtctttttctaaaaaagtgaaaaataagagaaacataaaacactaaggctaagagcttagaaccagaggtgttgacaggggtagactgagagttaatggagtggttgacgggccactggataccacacgaagctggggcccagtgcccatttgtcagaggagaacactgaggtgtaaggaagctaatcccctctgcccaggggcctcacagtctgggaggggtgatggggacttggaatctgagactgtcctagcaccaaaggtcaaagtttagagggtggggggtgccgagcgcccactcacccgtgtccttcccttgcagcccctgcccacacccccacacctgcaggcggagccagagaaccaccagtaccaggtatggagctgggagctgggaggggtggtggggatcccacggatccaggagccccgaagccggggtggggaggggtcaagacaactgaaactgggggctttcctcccctcgtccccccaagcctcacggtctctgctctcgaagaagcccaaaccgcctccctgagagaccctggcaagtcccttttcctcccaaggctgcaatttccttctttgcaaaagggatccaaaaccttgaacttgcacaggaggaacaaggcccagagagggacaggggattgcctggggccacacagccagtcaggtccccagtgaaaccccaccgcagagctcagtccctctccatcccctcctgtcagctgtctgtccctgtagttctgtctctctctctcagtggcctacatatgtctgtatgtctgtcttcccctttcttggactctctctctctctctctctctctctctcagtttctcttgctgtgtcctttttaatctgtctttctgtttccagtttgttcatgctgccttgtctaagatgcatctctttacatgtcttcgtttctctgcatctctgtctctctctctctccattctctgtctctcctgcctctttgtctctgtcactgtgtccacctcatttcttggctcttccaggacctcttgtctctgcatctcactctctttccaccttgctcttccattctctctgcgggtttctctccatctcacgctgtctctcatcctctgtccctctctgtctccccaagactctccccctccacccagtcataattctgttctctcttccccccaagcaggacctgctaaaccccgaccctgccccctactgccagctggtgccaacttcctgatgggtcctgggccaggccagccagggagaagacaaggccccagccctcctctgggagcctcacacctgagaccagcaggacaaggccattgggggctgtggggccgatgaggtggactcagccaaagactcagcagcacatggggcaggtgtcctggcagggggacaggagactgtaacaggcccaggtccttgtgcagcccgtgaatgcacgcccgccttcggtctgttccttcaagcaagctggcctgggccatgtgcctgtgaaaggcaggctctggcccctttccatgccaaagtcccccaagatctggatatctggggacaagatggtggcctcaggcctgcctcccaggcagttggctgggctcccaactgtctgtcctcaatgccctaccccaactccactagtgaccctcagagtcttctccccttaggacaaggcagacaccccaccatgcgggcctcaggtggcagagaggcccagcctcacaggcctgtggccccacacaccagtcccagcaaggtgaccacggctgctggaccccttccctgttcaggcaggcccagcccctctcagaacctgctgccagctgctggtcttggcccccaccctgaatcttactgagtccctctgggcagcagctcccttctccaccccaccccagcacccgtcccaaatgtggcctcagcttgtcctccccttccccaaactatgcattcattcagcaataaatgagcctttgctgtatgccagacccagttctaggctcttgcagccctggtagaaagcaaaacaaaaactcccgctttcccagagggtcacttggcaggggaaagaatcaggaaataaaataaataatgaacatgcgttgtctgtcagatggggataagtgtattggggaaatggaggggggtcgagagtattgggggactgagatttttaattagggcacagaggtcctcgctgagaaggtgacaaatgagcaaagacttgtaggaggggaagaaaggagccatgtggggctctggaggaagagcattccagacagagggaatagccagtgcaaaggccctggggcagaagcatgcctggcatattcaaggagcagcaagggggctgggcatggtggctcacacctataatcccagcactttgggaagccaaggcaagcagatcatttgaggtcaggggttcaagaccagcctggccaacatggtgaaaccccttctctattaaaaatacaaaaattagccgggcatggtggtgggcacctgtaatcccagcaactggggaggctgaggcaggaaaatcacttgaacccgggaggcggagtttgcagtgggccaagatcgtgcccctgcactccagcctgggtgacagagcaagactccacctcaaaaaaaaaaaaaaaaaaggagcagcaaggaggccagtgtggtggagagggtggggaaggaggaaaaggtgggtggaagttgacgtcaggagatggacggaggggcacatggcgcagggccaggtaaggcactgccgagactgtggctttgaggggcagggtgctgtgaaaggcgaataacggccccccagtgacgtctacatcctaatcccctgtgaatgttacgttatatgacaaaagaatgcagccatgattaagttcaggatcgtgctttggggagattatcctggattgccctggcaggctctttatgtaatcacacagatccttataatcgagaaggacacaggaagcgtgagtcagaggggctgtgacaacaaaggaagcaaagccctttgaagacgggagaaggagctgaaagtcaagcagcacttcagagtcagaatgattgagtgtgagagagtccatgggccatcgtgagtgttgaagacggaagggggccttgagctaaggaatgcaagaaacttctagaagctggaggagggccaagctcagtggctcacgcctgcagtcccagcactttgggaggccaaggtgggaggatcgcttgaggccaggagttggagaccagcctgggcaacatagcaagaccccgtctctacaaaaaaaaaaaaaaaaaaaaacagaaccgagggtggtggctcatgcctggaatcccagcactttgggaggccgagacagggggatcacctgaggtcaggagttcaagaatcagcctggccaagatggggaaaccccgtctctaccaaacatagaaaaattagccaggcgtggtggcgggtgcctgtaatgccagctactggagaggcagaggcaggagaatcgcttgaacccaggaggcggaggttgcagtgagccaaggttgcaccattgcactccagcctgggtgacagagcgagactctgtcttaaaaaaaaaaaaaaaatcagaattgaggaaaggcaagaaaatggattttcttcctacaacctccagaaagcaacacagtcccgctgaaaccttggctttagtgcagtgagacccattttggattcttgacctccagaactataagataacaaacttgtgttgttttaagccactaaatttgtggcaattttttacaggaaatgggaaactaatctagaggatgaggaagaaatcacagaaggagaagttgcgtctcatgctgactcagtatgcaaatactctctgggagacttctccatcctcagaccgctccagacaccaaatgcctgggcctttgaccgccttgctaagagggtcaaccaagccagccaggtagccagggctcagggctaggagtgtgaggggattccatcttttctctctctttttttttttttcttttttgagacttttcttttttgagtcttgctctgtcgccgaggctggagtgcagtggtgcgatctcagctcactacaacctacgcctcccaggctcaagcaattctcctgcctcagcctaccaagtagctgaactacaggtgcacaccacctcacccggctacttttttttttttttttgtattttcagtagagacaagtttcaccatgctggccaggctggtctcaaactcctggctctgcagacaggaggactgaaatccatggtggcagacgcctataatcccagaactttgggagaccaaggcagacggattacttgaggtaggagttcaaggccagcctggccaacatgctgaaatacagtctctactaaaaatacaaaaattagccgggagtggtggtaggttgagacaggagaatcgcttgaatccgggaggcagaggttgcattcagccgaggtcatgccactgcactccagcctgggcaacagagcaacactctagaacaaaacattgacagaatttgtttctggtttggatacaggggattggagagaagagtgtgccaataattggtttgttcatcaattcaatgaagatttattgagcatctgttgtggacagccctattctaggttctggggagacagccatgaatgagacagtgatggctgcttttggagagctgaccttctagtgggagacaggccacagaaaaacaaagcacatggaacataatgtcagggatgacgatgctgtgaaggaatggagcaggtgctaagaacctactggaacgggcatgcttaagaggtgctggagagggtcaactcttgggtgactgcttcgagcaatgggagggtggggagcaggggtgttgtacacactgcgacagggccaggtttgcaaaagaaatcaagacatggccacacaaacacttctgtgtgactgttcacagcagcattattcacaatagccaaaaggtagaaataacccaaatgcccatgaacagacgaatgagttcttttgtttatttgttttgttttgtttttgtttttgagacagtcttactctgctgcccagactggagtgcaatggcgcaatcttggctcactgcaacctccacctcctgggttcaagccattctccttcctcagcctccggagtagctgggactacaggcgcccaccaccacgcttggctaagtttttgtatttttagtagagatggggtttcactgtattagccaggatggtctcgatcgcctgacctcgtgatccgcccaactcggcctcccaaagtgctgggattacaagcgtgagccaccgcgcccggcacggtatttttactgtatcttttctatgtttaggtacacgaatatttatcattgtgctacaattgcctacagttttcaatgtagccacaggctatgcaagtttgtcacctaggagcaatagcctgtacctataccctagatgtgtagcgggctctaccatctaggtttgtgtaaacacattctgtgatgttcacacaacaatgaaatcgcctaaagactcatttctcagaacatatcctcatcatgaagtgacgcatggctgtattatccagtggaacattattcagccatgaaaagaaatgaagccctgacacatactgcagcaaggatgaccctgaaaacgctgtgctaagtgaaagaagccagacgcaaaggactccatatggtagggtcccattgctatgaaatgcccaggcaattcatcaagacagaaagtggatgtagtagttgttgggttgggaggaagggcggaatggggaagtgactgctcatggatacaagctttctcttaggggtgataggatgttctcaatgttttgtttgtttgttttcttttgttttgttttgttttttgagatggagtcttgctctttcacccaggctggcatgatctcggctcactgcaacctccgcctcccgggttcaagcgattctcctgcctcagcctcccgagtagctgacatcacaggtgtatgccaccacacctggctaatttttgtatttttagtagagacagggtttcaccatgttggccaggctggtctcgaactcctgagctcaggcaatccgcccacctcagcctcccaaaatgctgggattacaggcatgagccacggcatctagccatgttctcaaattgattgtaacgatggctgcacaactctgtgaatttactaaaagctattgaattgtacactttattttggttttgttttcattttaagagacggggtcttgctctctcgcccaggctggagtgcagtggttacgatctgggctcattgcagcctcaacctcctgggctcaagtgatcctccttcctcagactcctgagtagctaggattacaggcgtgcaccaccacgcccggctaatttttgtatttggcagagacggggtttcactgtattgtccaggctggtctcgaactcctgacctcaagtgatctgcctgccttggcctcccaaagtgctgggattacaggtgtgagccatggcactcagcccgcattgtatactttacatggatgaattgtgtggtatgtgaattacaccgcaaaaccgtttaaaaaagaagaaagggtggagcctttctgaacctattctggttcagaggctgccagattcgcaaaatattttttaaaagaaagagagaaatggggtgggggagggaggaggagtgtgggggggaagaggtggagaaagaaaagaaagagaaaaaaaagaaagagagaaagcaagcggggaggaaaagagggagcgagggagtggggagagaaagcaggcgggtttgagaggtcagtactgagtcggcaggaggggatagctggagaccggggtcggggtgtgtgagtggggacagtgaacataagtgcatcttgtagcacctgattcattgtcactccagaaatgtcaccttctttcactgtttggggtttgtgcttattgggtcgtcactattgccagacttgctgcaagagagggtcagccctgagccagcagggggcagcagagcaccacacagatcatgcacaagcgctgcagctaccttgagcccccccatgcgcccaccccgtctctgcccctttctttacccctctgggaacccagagagtctatccagctctccaaccccaaacctggacacctccctccccactctcacggcaggcaccaggccctgccctccaggcctcttgaacttggccttccccagtacctgcagcccagccctgggccaggcagcttctctcccctccctgccccagcctcccgcctggactcctccccactcccattctcctaccacagagcagcccaagggatctttctaaagcccaaactcaacctagccccttcctgctcaaaaccatccatggctccccagtgccttagagtccaagctcctcaccactgcctccaacgcctgcaaagtccaggggacgctcagtctcatctctcagcacccaccgccctctcaccttcacccctggtctacagtcccccagatttaacttctttctgtttccccacacactgtgttccatctcacttccaggcccttgcacacccccaggcacacagctccactcttcctgcccaccccattcaccctccaagtctcaactcatacacctcctcctccaggaagccctccttgacctccaagctgggtcagatctctcctgtgagctcacctaccccagccccgcccagtctgggccatcactgcctggggatgggtctgtcccgctgaactatgagccctataagcacaattgctatctccatcactgaggggctcccagcactgaccagcacaaggcagaggcccaaggagtgtggatgctcattatacacatccttccctttcccaacctagcagtccccattcattcattgacaaacgtctgttgagcaactactatcaccaaactctgttacatgaacttgactggcatgagagaggtgaagataaaccagcccagctcctactctcagggagcttgaggtctagtaggggagatgacctggaactcaatgtaataataataattaataataaacattaccgagcacttattatacgccatgcactatgctaagggctttacatttattcactgatatcctcacaacggttctgtgag[135 bp omitted]accctgtctctactaaaaattagctgggcatggtggtgcatgcctgtaatcccagctacttgggaggctgacgcaagaaaatcgcttgaacccaggaggcggaggttgcggtgagctaagatcgcgccattgcactccagcctgggcaacaagagtgaaactctgtctcaaaaaaaaaagtaatggcaaattggctgggcgcaatggctcactcctgtaatctcagcactttgggagaccgaggcgggcaaatcacaaggtcaggagtttgagatcagcctggccaacatggtgaaacccatctctactaaaaatacaaaaaattagctgggtgtggtggcaggcgcctgtaatcctagctactcaggagcctgaggcagaagaatcgcttgaaccagggaggcagaggttgcagtgagccgatattgtgccactgccctccagcctgtgggacagagcaagactccgtctcaaaaaaaaaaaaaaaagtaatggcaaaagccacaattacttttgcaccaacctagtactgtgattatccccattttacagatgaggaaactgaggttaagtaagtgaagctgaccaggcaaagtggcttatgcttttaatcccaggactttaggaggcaaaggcagaaggaccgcttgagctcagaagtccaagatgagcctgggtaacagcgagacccagtctgcacacacaaaaaaatttatttatttactttcatttatttatttatttatttattttgagatggagcctctccctgtcacccaggctggagtgcggtggcacgatctcggctcactgcaacctttgcctcctgggttcaagcgatttctggcttatttttgtatttttagtagagacgggggttttaccacgttggccacgctggtcttgaactcctgacctcaagtgatccacccacctcggcctctcaaagtgctgggattactggcgtgaattaccgcactgggccaaaaatatttaaaaattagccaggcgtggtggtgtgtgcctgtggtcccagctacctgggagactggggtggaaggac[153 bp omitted]ttctaacaccgaaaatttgtcttctgctcatcccagcctgaaaggaaggtgaaccaagatgcaatccatgcccattcaagtggggtctgtgtgtccaggcagaggtgtctgccctctacaaagggcacaggggagagagtgatgcttaacccaaaggaggtctcgctgatggtggaatttcaggcaccgtgtttatgtttggcctaattagcttgagaccagtgtccttgacgggaactaagacgccccccacgcccatccccggctcccaggctctctccacccaagttctgcccaccagggcacactgcttccctctgccacctcctcttcccacgagccctggtacaccctagattctcagggctgtggctccttgctttacaaatgagtaagttggtggcagggaaggaagtgggctgggccatgaccaagagtcactatgattcacggggaaaaccctgccctcccgattcaactctgtgtgcaaaaaggttttgtgcgggttcctagggtctcagggtcaatggatgtagatagaccactagaggtatacacagccactgtccaccaactctcccaccccccgggtctgcctacagccctggatggggatcctgtaccgggggggcggttggggggttggacaggtgtgggttgaggtgttgtttacatgttgaacacactggggttccaggtaagtttccgtcagaagaaagcacttcactgctgaggcagaaatttcaaaatattgaaccacttttcgatcctggcagaagggaattttcccagggtgataaaagtgttctaaaattagatttgagtgatggctgcccaaaaggaattatgatattattcaagaaatcatggctttgctgaacaacagaaaactcgaacactgagcatttgaagatattaaggaattgttgatttttatgttcactgtttaggtgaaatgatagcattgtgagtgtgttatttttaaatgagtccttatcttttaaagatacaggcagaaatagctataaaatgatctgatggctgggatttgctttcaaataatacaggagagggccgtgggtgaggagagggaaccagattgcctatgagctgagtgatgggtatgtggttgcgagggcagacaccattcttctctctgctttcgatgggtgcgtagaatttcccataataaaaagtggtttttaaattgttttgaccattggcctcgcgcggtggctcacgcctataatcccagcactttgggaggcagaggcaggcagatcacttgagggcaggagttcgagaccagcctgggcaacctggtgaaaccccatctctattgaaaacacataaaaattacccgagtatagtggcatgcgcctgtaatcccagccactcgagaagctgaggcaggagaatcgcttgaacccgggaggcagaggttgcagtgagctgaggtcgtgccactgcactccagcctgggcaacagagcgagactccatctcaaaaaagaaaaaaaaaattgttttaaccattctaaaggaatgagaaaagaattctacaacttttgtttttttgtttttttttttgagacagagtctcactctgtcccccaggctggagtgcagtagcgtgatcacaacttactgcagcttccatctcctgggctcaagtgatcctcctgcctcagcctccagagtagctggaattacaggcatgtgccaccatacctggctaatttttttttttttttttttgagatgaagtttcactcttgttgcccaggctggagtgcaatggcgggatcttggctcactgcaacctctgcctcctgggttcaagcgattctcctgcctcagcctccccagtcgctgggattacaggcatgcgccaccatgcccagctaattttgtatttttagtagagacggggtttctccatgttggtcaggctggtctcgaactcccgacctcagatgatctgcccgcctcagcctcccaaagtgctgggattataggtgtgagccactgtgcccagcctttctttttattttatttttagtagagatgggactcactatgttgccctggctggtctgaaactcctgggctcaagcaatcctcacacctcagcctcccaaaatgctggggttacaggagtgaggcaccatgcccaacccaggcctaaccataattctaaatccaagtccaaccccttcccactttcctgaagggaaaaatgaggtgcagagagaggaaggaacccctaaccaggtccctttagggtcccaagagaaccctggcactctctgctggcctccatccccctaactctgcccttcacttcctcccctccagcaccttccagaaaagctctaggtggctagtccccctctgaccaccttctcccactttcccctgcccctcactcagctccagtcacaccaggctccctgctgtccttatgctcatcaaagcccctcctgccccagggccttgaattcacttgttgtaccttctaccaaaaacactctcctcccacacacccacaggctccctcctctgtcgcctccttcaggccagaaaaagcgccaccaccaccacctcccaaactaaaacagcaacccctgctcctctctatccacttgccctattttatttaattttatttattttgagacacaatctcacactgttgcccaggctggaatgcagtggtgcaatctcagttcactgcaatctccacctcttaggctcaagcaattctcccaccttagcctcccaagtagctggaattactggtgcacaccaccaccacgcctggctaattattgtacttttttgtagagataggatctcactg[135 bp omitted]taaatgccatatcaggttttttttattattattattgcccatctccctccaataggatttagcccaacaaaggaaaggatgtctctgtgcaaacagcctggtacatagtccatgcttgacaaatatttgttaaatgattgaatggcttggaaaaacccagatgaatgaggtgaggagggtggggacgggtatccaagcacagggaacagcctatggaaaggtctggagcttctccgatccacctgcctcctctcctgcatggaagcctaggtgctttttttttctgagacagagtctcactctgtcacccaggctggagtgcagtggtgtgatctcggctcacagcaacctctgacttccgggcttaagtgattctcctgcctcagcctcctaagtgtctgggattacaggtgcccaccaccacaccgggctaattttgtattttttttagtaga[139 bp omitted]gaattaaggggacatttggtcctttctccccaagaacaacctctccaggcccagccagagccaactccaggccttgacaggccggcacaggaagccacaccctgagcaaatatgacggccccctctgcctcgcccaagataaggggaggttgaaaggggtttggaaacctgcttcagcctaagacattagctccagccaaaccctcagtctcaaggcctccccacccctgcccagagaggacaggacaaggattctgccacggaggcccaagtctgacgtttacatctaatatatattgatgatgtcagtggtgggcagggtcttgaagagcagataaaggagttcccagcctccctcccgctcccaaggaaactaagtgactggtgagacaagagggctgggcgggcaaggggtgaccctgaccaaacaaggtcatagacccgtgtccccagatggctgtgcagagaagataagactcatctgctccaatcttatgaggcaatggcccggggcctcagtttacttgtctgcaaaatgggttttcttgggggtgggcagcggggagatggataacaggaaaagctgaagctgtcaaaaagaataatgggccaggcacggtggctcacacctgtaatcccagcactttgagaggccaaggcaggtggatcacttgaggttaggagtttgagaccagcctggccaacatgtcaaaaccctgtctgtactaaaaatattaaaattagccaggcatggtggcgcatgcttgtaatcccagctactcgggaggctgaggtgagagaatcgcttgaacttgggaggtggaggttgcagtgagccaagatcgcaccactgcactccagcctggatgacagatcaagactccatttaaaaaagaagaagaagaagaagaagaagaagaatgatatcagcagaatacatctacaagctgaccacttctcccatccctggttcagccgccactacctcctgcctggtccagcactacccaacaggagcaagagtggagccgcaaacacaattcaaccttttccagcctcatctcatgaagaaaggtgaaacgaatgtatttaacacaacatatgcaaaatgtcatttcagcacagaatcaatataaaaaactgattatctgttttacattattgtgtatgcatgcgctcttttttttttttttttttcttaatgagacaacaaggtcttgctctgtcgcccaggctggagtgcagtggtgagatcacagctcactgcagactcaacctcctgggctcaggcgatcctcctacctcagcctgccaaatagctgggactacaggcgtgcaacaccactcctggctcatttttaaatttttttgtagagacgtgctctacgctgcccaggctggtctcgaactcctgggctcaagccatcctcccgcctcagcctcccaaaatgctgggattacaggtgtgagccaccgcgcccggccccccttattgaacctctactccaatgtcgctctgacaatgtcgccttgctgccctgcataaaccagtgccccgaccacctccatcccttcccctgctttatttttctccacagcattgtccccacctgttctaacactgctcatgtttgtattcgtctattaactgtctccccaatcaataggtcagctctgtgtctaccgtattcacggctgtaaccccacagcgcctagcgcagtgcccggcacatagttggtgctccataaacatttgtcaaatggtggaggaacaacgaccactgtgcccccagtacgtgctctgaggcaggcccggcacggaacactccatgtgcctattttgatcctcagaagagtcccagggaagtcaatgtcatgaacaccccccacccactgcacaaacaggaaaaagcccctgcccacaagaaccccgtctgctttctgcgcagcccggcggcgcacagcaggtgctaaagagcctgcagctcttgactgaaccaaggatctgggctcacagccgggagcaccagaggaggggccagggaggtggaggatgggggcagactaggaagggtggatgtgacgatagagggcctctagagcccggcctggtcacactccgcaggcagacagcagatcaccaggaacctgagcctctctgaagactcctctctctgtgtcatccacacctggtgtccagttccacaaacatgctgtgagcctctgctctgtgccaggtgatttgctgggcagtgctggggacacagtggtgacagcccagccgtgcccagctgaggctcccaggccagtgggggaaaaagacccagccccagacagcgagaacccaaggcagtcagggctgagacagggaattccaggccctgaagtccaggagggcttcctggaggagagggtttggggaaggcagtggaatagagcagagggaagcagggatattctgggtagagtgcaagtgaaacagaagaactgaagcagagggttcccggaagcaagtggtattctatgtagctggtcaggtgggcaggagtcaggccgggcagggcctcctgggctacagtgaggaacctgggcttcctcccaagggcactggggagccacagcaggttctgagcacggaggggcagaggcaggtttttgttttggaaagagcctctgtctgccatgtggaggggcaatgggagtcggggagaccagggccagagactagggaggaggctggtggggagacaggaggacccaggcaaggtggggtggtggagtggtcacctagaccagggcaggggcttcagggagggagagaagatatacgtagagtcagttgccagaaggggtggcgtgttcggggagtagggggaggcatcagggatgaggccccaggtctcttttcccagcgatgaggtgggtagtggcgccttccctgataagggcaccaggggaagatacacttctgggggaagatgccaaggtcagtttgggacaaggtgagtgagaggtgcccagggacatcagggaggcatcctgattgatactgggatgaggtcccagtgctctgggccaggacgcagaagagtgaggtgaggtcacaggtggggagaggggagcaggaggcgccaggacatcctctgtgcctctcacctggcctcacccgcacctcctcagggccttctcccccttgttagagccctgccccacgagggcagcccaggacacagtgctggaggcaaaccaggacaggtgagcacaggtgtggccccctgcccggaagcaggctgcagaggcctcagaggaaccaggactcagaagccatcaggatgcaggtcataagaacacagctatcagcagctctggcaccacaaccccctcggctcctgcccagcatcatctcagagacaccttccctgttaccctccctccaccccaatttaaagtagcaaaccaggccaggggcagtggctcatggctgtaatcccagcactttgggaggccaaggtgggaagatcacttgaggccaagagtttgagaccaggcagagcaacatagcgagatcccatctctacaaaaaataaaatggcaaatcccctttctgactttatttttcaatctgacgtggaagatatttacctttcctttatttactccgcaaatgtcggccccctgagggcagggatttcatccgtcttgtgcacggctgcatcctcagcgcctagaacagcacctggcaaacaataggtgctcattcagtatttgtccaataagtgaatgagtgatttactgagcatttactctgcgccagtcgtggtaagtactgtacttcacatgtgtatctacttaatcctttcaacagccctgtgatgtgagtactattgttttccctattttacaaataaggaaactgaggcttggcagagtccataaattgcccagggtcctggaggtaggaaacagtggaactatgtccagagcctatacttttttttttttgagatggagtttcactcttttgcccagggttcaagcaattctcctgcttcagcctcccaagtagctgggattacaggtgcccgcgaccacacccagctaatttttgtatttttagtagagacagggtttcaccatgctggccaggctggtcttgaactcctgacctcagttgatccacccacctcggcctcccaaagtgctaggactacaggcatgagccactgcgtccggccatgagccaccacgcccggccagagcctatacttttaataacaggcataccaatcagacccacgtccaccaggctctggcttaaatccctgacttgtagcctctcactaactgctgtcaacaaacctgaagtagggtccatatcatctctatttttttgtttgtttttgaaatggagtcttgctctgtcacccaggctggagtgcagtggcaggatctcggctcactgcaacctctacctcctggattcaagcgattctcctacctcagcctccctagtagctgggattacaggcatgtgccaccatgaccggctaacttttattttttgtttttgcttttgttttttgagatagagtctcactctgtcacccaggctggagtgcagtggtgtgatctcagctcgctgcaacctccacctcctgggttcaagagattctcctgcctcagcctctcgagtagctgggactacaggtgcacaccaccacacccagctaattttttatatttttagtacatacgaggtttcaccatattggccaggctggtctcgaactcctgacctcgtgagccacctgccttggcctcccaaagtgttgggattacaggcgttagccaccacacccagctaacttatatttttaatagagacggggtttcgccatgttggtcaggctggttgcaaactcctcacctcaggtgatctgcccatctcagcctcccaaagtgctgggactacaggcacctgccaccacgcctggctatttttattattattatttttagtagagatggggtttcgccatgttggccaggctgatctcgaactcctgacctcaaatgatccgcctgccttggcctcccgaagtgctgggatgacaggcatgagccagtgcacccggccatcatctctatttatcagaataataaatggagactcaacaagggactgtccccagccccactttgggtaagtgcagagctggtgtcaaaactcagctctccttggccccaaagcctccgaatacgcccatttgacagagaggggaaaacaaggcctccgaagtgggagaaagagaatgtgaacttctgagcactttgcaggaagccaacaagaaggagagccccaaagaaagcatgtggccatacagtttcctgcccttctgtctgggtttgcacacagagcagggctcaaatcccctctccctgcaggaacccggacaagtgggagtccccacctagctcatctccatctgcaaaggggggtcctaaaggtgcccactttacagggttgttttgccatccgctgagacaacacctgtaggtcccctgcactgggtggggctgggaaaggtgcagtcaccttttactgattttcttccttggtgactcccaggctctctgaggaggccacgggcctgggtggttggtaagaactacccgaaaaccttcccctacttttcctctcttctcctcggtgacctggttcctctcccagtaccaaatccaggccctcggcacaaagagggttaggcggctgccccaggaggcctgcccaggtcacggcctctggccggtgcccgccacacccaccctggtacccaaaccgggccccagatccttggtgactcgatccctccaaattcaggtgatctcccctggctccaaatcaccaaaccctcccaggtcctgcggcagacggagccgagccccaaccaggaagggagtccgagcactgggacttcaacgccaccatctccaagactcggtttggggtgaaagatggcgctgactgggtacagctggctgctcctcagtggtgagcgagaatggcaccccccagcacctcagccccccgaggaccccagggaggggaggggacccccagtctgagagagggaaggtgtgagcagaagtccagcgtgctagggagggagggcagccctgcttcacaccggcagtttacccctccaagaggcatctgcattgggcaggctggggacagccacccagagaggttttcagggtgggctttggagatttctaagcccagggcacaagccaggacaagggagccgctgttgctccttcattcctgcaggtttctgttttatcagctatggaagccttgatgaggctaaactcttcccagcagctgtttctcccggaagatgtagcttagggcagttgcctttcccttctcagcctctgtgtacccacctgtgaatggggcctcactgacagggtcatgtaaaggtcattataagcagcaccacatatgccgtgtgcccggagctgttctgagagcttc[131 bp omitted]accccatctctactaaaatacaaaaaattagctaggtgtggtggcacatgcctgtagtcccagctgctcgggaggctgaggcaggagaatcacttgaatccaggaggtggaggtcacagtgtgccgagactgcaccactgcactccagcctgggcaacaaagcaagactccatctcaaaaaaaaaaaacaaccccaaaccacctatgagggaggcccacacatgaaccgcacttcatagggagaaaacgaggctcagaaaggtgaaaccattggccgctgtcacacggccagagagtggcaggactgagggctagacccagagaccctcactcctagccacactctaacagcctggaaagtaccagaaagctggccagccatgtcagtccttttgacgtgagcactgtcacagccgcccgttccgggcattcaaaccacacgtcattcaaacccaagcagccccgaccagctcatcgggcttggggctgatctgcttggttgagaaggaaaggggtggagtgtgttcatcttacccctgctttccgctgtaggcgagcttggagaggcagaggcagagccccagactgggagtcaggacccagggggcaggccctgacatcctacgtggggccatacaattagctgggctggatacgcagccggatctcgcgagacttagtttggtgactgtcacgatgggaaaaccctttgggtccggcttaaagccgcaggtcctgtgggccgagcacttgctttgcacttgctgtatgcaagatgtgatgctagatccttggcacagtccatcagacccaatcctcacaacacacgcctccctccctcggactgagtccctccctgggactgagctcctgcatctgactaacatgtattgggcacttactgtataccaggcattgtaagcatggtatgtatacagaatccttacaaccttaccaggcaggtagacctgtcatccccatgtgagagttggaagaacagaaacacagagaaagacagtgtactcgaagccatgcagataaactcccagaaagattaggtggctgagatgttgagagtcagagttgcaggttcaaatcctggttttgcctgtcctcatttacacagaggacactgggctggggacatgccccgagcctgagtctcttcttctgtcaaatggggcgattgatcaaacctgcctcatccaacccctctgactcctcttcctcagccacattcctgaatgtgggggccgagatctctatcaccctggagcctgcccagccgagcgaaggggacaacgtcacgctggtcgtccatgggctttcgggggaactgctcgcctacagctggtatgcggggcccacactcagcgtgtcatacctggtggccagctacatcgtgagcacaggcgatgagactcctggcccggcccacacggggcgggaggctgtgcgccccgatggcagcctggacatccagggcatcctgccccggcactcaggcacctacatcctgcagaccttcaacaggcagttgcagaccgaggtgggctacggacacgtgcaggtccatggtgagacaccccccaacacccgcctctgccccagctgggccttcccatctccttctcaatccttcttttttttaaaaaaaaaaaaaatccaacaaatcatcagggaaaccatcagggaataagtttctaaaataacctcaaaatgctcacctccttcaagatggcctccaggattagacctgcctcctaaaaccattctttgtccctccggctgagggtgtgggggcccagccacaatccggccatgccccttgttgggggaagggaaggccctcagagcaggtggtgtccggccccctccccctctgtctcttgcccccacagagatcctggcccagcccacagtcttggccaacagcacagcgctggtggaacgtcgagacaccctgcgccttatgtgcagcagccccagccccaccgccgaggtccgctggttcttcaacggtggggccctgcccgtcgctctccgcctgggcctgtcccctgacggccgggtgctggccaggcatggcatccgccgggaggaggccggcgcctatcagtgtgaggtgtggaacccggtcagtgtcagccgcagcgagcccatcaacctgaccgtgtactgtgagtcctcctggccccactggagatacccagtgtccaaacctcatggatggggaaactgaggccaggagagggggcctaagggcacacagcgagtcagcaggcaagctgggattggggaccagggacccctcttaaagtgcacttgccctcgccaggtgcagtggctcacgcctgtaatcccagcactctggggggcctaggcgggaggatcacctgaacccagaagtttgagaccagcctgggcaacatggcaagacctcatctctaccaaaaaacataaaaattagccaggcatggtggcacatgcctgtagtcccagccactcaggaggctgagatgggaggattccttgagccccggaggccgaggttgcaggtgcagtaagctatgattgcaccactgcactccagcctgggcgacagagcaagatgctgtctcaaaaaacaaacaaacaaaaaaaaacaacaacaacaaacaaaaaaaatacacttgccccatatcctaaaggacttctacagaccacctttactattgaataatccttcagttaggagcaatatctacagagaaaggaaacagggccagttggtttgaaaagggagcaggggagggaatagtgtaatgggaggggacacaaaatttaacaacataaccaaagcatgcagtcgttcccaggagcagcagatgtgcagtgtggaatcctgggaaaataaatcaccaaggtacatgaggacccatgatgtagaaaaacttagtgcctacaatcctagaatcttacaaccagagaattccagacttcagaagcactgaattccagactctgagaatcttagaacctctagacgcagagattcttagaatcttagaatctaaccctgaaatcttagtctagaatcttagaaacatagatttctagaagcttagaaccttagaacctagaagcaccaattcttgaagccctagaattctacactcttagaatggctttgtcagaaaaaaaaaatcatttaggctttttttatttgtcaatggagccatagatttcaaaaataccttgaaatattatcttgcccaacacattctttttacaggagagaaaggtgagatcctcttagagggagtgattctcaagatcctagaacaagttagagttaaggccagagctttttttcccctccactaggccaagatattcccagggacctagcttggtggagagaaaaccaggggtaccaacctccactcctccttccctctactgccccatctatctccctcctgcccccacagttggcccagagcgtgtggccatcctccaggattccaccacccgcacaggctgcaccatcaaagttgacttcaacacgtccctcaccctgtggtgcgtgtccaggtcctgcccagagcccgagtatgtgtggaccttcaacgggcaggccctaaagaacggccaagaccacctcaacatcagcagcatgacagccgcccaggaggggacgtacacatgtattgcgaagaacaccaagaccctgctatctggatctgcctcagtcgtggtcaagctctctggtgagtcacccccagcctgaccaccccccagtccccatggaggcctcatcaggctgcgaaggttaagccaccatttgcccaacagagaattggaacatggtagattcacagttcattcatgagctgtgacaaagtggcatatcaggcagatctgtttgcatctgggtctaaagagagacagcccgtgtcctgttcacctagagaacaaatggcaaaccattgtgggttgacagagtggaaaatcactcagatatcacttcaggtgggtgccactgctctaaattcagtcaccagctgtttagggccttgaccctctacccgcccccaccccaccacacagacagctgaaattctgtgcagccaactagactacccagttatctgacccagatgatgggtatacacacacacacacacacacacacacacacacacacacacacaactgaagaatcacagccaattgctggcaaatggagaaacagctggggaggcattgtcatcttgcttctgtcctaaaatgacctgagggctggggcagtgcaggcagctggcatttcagagccattgggatcctcaggcgacattttctcatcttccggagatggtggctttgaacattaaggcctcattaattctacctcggttccttcccaagtggccatcagcccccgggggacagtggggaatggtcgttccctccctcccactaacaggctgggtctcatccaaggggtggattttcacccaaagcagaaatggcatccccagaggtaagtgtgactcccgctccactcatctggggctttggcagctggtcttgacaggagacagggggatggaccagatgacctcaggcgccaccccaagccctgtctgtgcagtccaagaaggggggtgtccaaggtatgcaggtatgtgcagggagtggatacagtgcccccaagggcttctagcactgtcagcaactctgtggcaggtgctgggagagacacagaagaaaaggagacgccaccctccctccaccttgggagactaatctgatggaggagacaaggcctctgtccttggagagatgatcctgggacagggaaacatggctcctttattcaaggaatagctgctcaaagagaagaggcaatgcctcatccttcatgtcagtaatgagggagatatgacaacccaccctcagtgagctcctagtcagatggaggagacacagtctgcacttggggagaaatttccttctgatggggagacttggtctccaggagacatggccctgttttttgagcattcctagtctgatggggtatccacctttggggtactcctaatctgatggaggagtacaggaccccactttctaggaatttccagtctgatggaatagacatttccctctaacttccagggtccccaacttgattggaaaaactcagcaacaatttagaatttctcaatctgatggaggaaacagggctgccgccttgtaggaattttcaatctgatggaggagacatgctctcaccctcaagaatctttcaatctgatggaggagctatggcttacacattctggggtctctcggtctgacagacacaagtcccaaccatctcatggggaagacatggtccccattttctgggatttccactctgataggggagacatggcccctatattttgggaatttccaatctgatggaggagacatgacccaagcctctagggtcttccagtttgatgggagagacacctctcaaagtctgggaatttgtagtctgataggggaaacacagaccccagcagacactactgggacccagaatccacctccaccaccgcacaagtcacctccttcctcagtctccttcccagcaccctacatggggagtgccagccagctggggggaggccagcaagggttgggaaggggacaccatgccagatgcagaccaaactgacccagcccgctcgctctctccccagctgcagcagttgccacgatgatcgtgcccgtgcccaccaagccaacggagggccaggacgtaacactgaccgtgcagggctaccccaaggacctgctggtctacgcctggtaccgcgggcctgcctccgagcccaaccggctgctcagccagctgccgtcaggaacctggattgcaggccccgcgcacacaggccgggaggtgggcttccccaactgctcgctgttggtgcagaagctgaacctcacagacactggccgctacacactcaagactgtcacagtgcagggcaagactgagacactggaagtggagctgcaggtggcccgtgagtgtgtgggaaggggcaaggcgtgcccctttttagacaagggctcccaaaaggagcctttgcttcctccatcaggctggggggacatagaccaaagatggatacccatcccccatcaggctgaaggaagcagccttgtctcctccgcctaacttgggggtccccaaatagggttctgcctcttctatcaaactaatgacctacactgtgggtagacaggcctcctccatcagactgagggttgctaaaggggacccccatgccttctctctcaaataagaggtacagcacactgaaggttttaaaagagaaggcatagtctgatggtggagcatcctttttcctgcagacaggtggaccctaaaacatagggtccatattggggtaatgggttaattataggagtttacctctcctatcagactgcaggcagagaataaggatgaatcaggcctccctattcagactgggagatcctgtgcagtggggatcatgtctcctcctttctattattgtgagggcaaagtttctatcatcagatggtggagtttctctttcaaactgaaataaggatgattgctccattaggatggaggcctgtaggtgtggaagttgtgtctcctcacagaatggaagttcccagatgttggggaccatgtctccccatcagactgggagctcttagaagtcaggaacaatgtctcccccattggattgggaattcccaagtgttggagaccatgtcacctccctcagactgggagctctcagatgttgggaaccgtgtctccccatcaactgggagcttctagagtcagaaactatgcctcctccatcagactaggagctcccagagtcaagatccaggtctcctccatcagactgagagctcccagagttatagaccatgtttcctccgtcagactgggagctcccagaggcagagaccacgtctccttcatcagactgggagctcccagaggcatggtccatgtctcctccatcagactgggagctcccggagtcagggactatgtctccctcgtcagactgggaactccaggagtgagggtccatgtctcctccatcagactgggagctcccagagtcagggaccatgtttcctccatcagactgggagctcccagagtcagggaccatgtctcctccatcagactgggagctcccagagtcagggtctatgtctcctccatcagaccgggagctcccagagtcagggaccatgtctccttcatcagactgggagctcccagagtcagggaccatgtctccttcatcagactgggagctcccagagtcagggaccatgtctcctccatcagaccgggagctcccagagtcagggtctatgtctcctccatcagaccgggagctcccagaggcatggtccatgtctcctccatcagactgggagctcccagagtcagggtctatgtctcctccatcagactgggagctcccagagtcagggaccatgtctcctccatcagactgggagctcccagagtcagggaccatgtctcctccatcagactgggagctcccagagtcagggaccatgtctcctccatcagactgggagctcccagagtcagggagcatgtctcctccatcagactgggagctcccagagtcagggaccatgtctcctccatcagactgggagatcccagagtcagggtctatgtctcctccatcagactgggagctcccagagtcagggtccatgtatcctccatctgactgagcatccccagaggtctgagtccatgtccctacagcagggccaggtttcccccattagctctcagacactggggatgagatcattccccaagtctggaatcttgcctcccccagcagacagagcattctcagaagccatgtccctgagtccgggatggtgcctcccctatcactggaaatttccaggatcaaggactcaaccactgccagtcacccactttcatccagtcactgatcaaaccctggttttctgggtcagtgttaggggagaatgctgttcagtggcagcaggccaccccggcaaagccttgggattccttttcacccattctctcttctcacagtcaacctccctccctcgcacaaggaccaacgctaccttcctgaacctgaacctggcacaggctgagcgtggggtggattgggccactgggtggcccggggtgggcaggggagcagaaggggtgggggcactggggacctggtcctccatctctctgacatcctccttcgccccctcgccccatatgccccacagccctggggtaacagcgtgaccctggagacgtccagagagaagagctcttcgcaccatcctctggtcctcgccctctgagtgggaaccactcccccacagcgaggatgccaggctgtggtcctgctgttctcctgcctccaccctagagctagagccacagggccccactccctcgctgagctgttggggagccaccgaggccataaacgtcctggttaatgcacacgtgtgtcagcctctccttccaccaccgctagccccgccatttcctggtggccgcactcatttcctttcccccccaagacttttctcagtctgggtgtgcacgtgcaggaggatgggcccagatcaccgtgctccacaccccactgctggatgccagggccttgtgcccctcccgcagtgctccaggttatatgtgagagtcctgctccccagctggccaaggactgcccctcttggagcaccagcattctgtgggacatggctctcccctacactgcacctcattttgtcacctggaccccgaaacagggctgcttgtgctcaggaaatgaccatattttgcaagaagtcttccatcaccttctggtagtcctcacccatttaatcaaagacacaactttgtcctgggattccccgcatgtctctccaacattatctgcccaaccctgacaatatctccttccttctgcagccacaggaaaggccctgtggatggatgaatgcaagcggggcagaggtagaggccaggagtggagagctgggaagtgggggccagaatgagtgtgttttctaactcgtctcattagtgggagccacaggccccacccagccgcaatgccccactggaaacaggttcttggcattggtcaggagtggtgatggccgagtcgaggcttagaatagaaagacaggtttgggcagagacgagaaaggcccttttggggatgattgtgttgagttggggtgatgggtggtgaaagacctccagaatgagggttataaaacctggatcaaaatcctgcatttgccacggattcactagagcctcagtttgcccatcagtaaaaaggtgtggacttgaggtggaccagacttttccaaaccatttttaaaagcctcagagccctttcttcaaatacaagtttacatggcaggtcaatttattattaatatttaaaatagcaatgcaacaaatatagccccagcacagtgcccatgcctgtaatcctaacgctttaggaggctaaggtgagagaaacgcttgagcccagaaatttgagaccagcctgggcaacatggcaaaatcccgtctctatttttgaaaataaataaataaataaaaccaactatagataccaattcaatagctatactcgtctcccccaaaatttctatagaattggaaaaaaaattacttaaatttaaataccactgggattagccagacatggtggcgcatgcctatagatcacttgagcccaggaatttgaggctgcagtgagccatgattgcaccactgcactccagcctgagcaacagagtgagactacgtctcataaaaaatgttaaattttacaaataaaaggtaacacttggggccgggcgcggtggctcacccctgtaattccagcactttgggaggc[134 bp omitted]gaggcaggagaattgcttgaatctgggaggcagaggttgtaatgagccaagatcgcaccactgcactccagcctgggcaacagagcaagaagactccgtcaaaaaaaaaaaaaaaaaaaagtaacacttggactacagaagcaactaaaatacaagatatcaaccagaatcaaatgacagtaaaagcatcatatacatcaaacctgtgggacatggccacagccatccttgaagagaaaaatgatagcttataagcattgagagtactaaaggaaaaagacttgaaaatgaataaaacaagctttctactcaagaaactagaaaaagtccacaaaacgaaccaaagaaaaaagctaaggaatgaagaaaggtaaaagcagaaatagatgaaatgtaaaacaaaacatggccaataaaacctaaagctgattctttgaaaatgcaatgaaatagacagactttctgcaggtatgatcaagaaaaaaaaaaaaaacagagaagtataaataagaaacacaaataataaagagccaaggagattaatatataaaataaaaggccctggggtgggcgctgcgctcacacctgtaatcccagcactctgggaggctgagccaggaggatcacttgagcccaggagtcccagaccagcctgagcaatgtagcaagacctcatctctacaaaagtttttcaaaaattatccaggaatagtggtgcatgcctgtagtctcagctacatgggaggctaaggcaggaggattgcttgagcccaggaggccaaggttgcagtgagctataatcaccctactgcactccatcctgggcgacagagcaagaccttgtctctaaaaaaagagagagagagagaaaagagaaactggtctggttgaagcaaaggttgctcaataaatatacattgactgaagagggatctgttggttgctccccagcccactgccctccctgcttccatgacacacgcactgcctccctctctagaagctgaaaatgtcaggtactcactttcccaaactgccttgcagctgcaagcagccatgtgaccaattcaagcccatgaggaaggagagagcctaaagttccacccactgactccacctcaccggaggggacactgagggagctctatggagtttgaaagctattatctaaattagtggtctccattgtggggcttctagctgggacgtgaggatggacttgagcccatactactaaccccaacactatccagcccagaaagaagaaatagcatccatattaccaccttcaccccacccccatccacccaagttcacataaaaacttgacatagatgtggct[152 bp omitted]atagaaaaaattagccaggtgcagtggcaggcacctgtagtcccagctactggggaggctgaggcaggagtatggtgcaaacctgggaggcggagtttgcagtgagccgagatcatgccactgcactccagcctgggcgacacagcaagaccctgtctcaaaaaaagaaaaaaaaattagctgggcgtggtggcaggtgcctgtagtcccagctactcgggaggctgaggcaggagaatggcgtgaacctgggaggcagagcttgcagtgagccgagatcacgccactgcactccagcctgggtgacacagcgagactctgtctcgaaaaaaaaaaaaaaaaaa[131 bp omitted]tgaagccccatctctactaaaaatacacaaaaattagccgggcatggtgtgatcaagaaaaaaaaaacagaagtataaataaggaacacaaataataaaaagccaaggagattaatatataagataaaagggcacctgtaatccctgctacttgggaggctgaggcaggagaattgcttgaacccatggggcaggggttgcagtaagctgagatcataccattgcactccagcctgggtaacaagagtgaaactcagtctcaaaaaacaaaacaaaagaaattatcttcagtggctagtaagaaatattggaactagcataaacaattaggcagaatagatacacagggagtagcttatatggctagaagattatttttctcatttctcaaacgtaaaaaatctccagaagcagattgttcagagctagaatggaggccctgtagtgtcatcagggacacagctccttctattcttctgttccattatccttaccttggggtttccatcctctccatcacctcatggcccaagatggctgctggagtcacagctgcctcatccatgttccaggcaagaagcagaaagaagggaacaaagggaaacaaacaaaaaaaaactccccctagccagtttatggactgtgccccttttaagggaactttacctaaggcccatccaacaacccctgcttagatctgattggccagctcatagtaccatggccaccctagctgcaagggaggcagggaattgcagtcattgccttgggtatgctgctgccccaattaacatcaaggttcttgtattaagaaaggcagagagaatgggtcccgggtgggcagctggcaggcttggccactccaagctttggaacttctacctcctcagctaggcaaaatggccttcctcacctgagcccaaggagtaagagtcacagcccccatagcaggggtttgagaaagatgggagctgctgctctgagctgtgattgtgtgcagttgatgcagaatgaggccagcaggaggggcagaaggagggaaggagaagcagctcaggtttctaggtcaagcaaaatcccatagcctcagggtgtggtggaggctcaaatgtccccaagaccaggtcctccgtccctctgggcatctctgtgctcttttactgaattatctcaagtagtgcaatccccttcattaagagtgtaggaaagaataataacaataaccacaaaataataatcactcctatatctcgagcatcagtgtattagtccattctcacattgctataaagacatacctgagactgggtaatttataaagaaaagaggtttaatcagctcatgattctgtgggctatacaggcttctgcttctggggagacctcaggaaacttacaatcatggcagatggtgaaagggaagcaagcacgtcttcacatggccggcaggagaggaaggtggggtgctacacacttttaaacaagcagcactaggaggatggtgctaaaacattagaaactgcccccacgatccaatcacctcccacgaggtccctcctcctacactgaggatcataactggacatgagatttgggtggggactaagaactaaaccatatcaattggttttatcctttttcatgcaagatctcaattcctacagcagctcttaagagcagttactatcattcccccaacttacaggtgaggaaactaaggcacagagacttgaaaactttgctccaagtcccacagttcccatgtgtcctaggtggaggtgctggtgggggagtcctctccattcttcagcagggcagagggtttcagggcacagctctgaggacagacagaattctttttagctgtgggaacttgggtacattgcttgcttttcctcctcgtaaaatggagatgataatactgcccctgcctcctaggattgttgaaaagatcacattagttaatacaagtaatgagcctgaaacatggatgctcaataaatgcctatgacccagactaaggtgttagattttaacaacaggcagatagaaaaagcaaagataacatttttctttttcttttttttttttttttgagacggagttttgctcctgttgcccaggctggagtgcaatgcatgatctcggctcaccacaacctctgcttcctgggttcaagcgattctcctgcctcagcctccccagtagctgggattacagacatgagccaccacacccggttaatttttttttttttttagcatttttagtagagacggggtttctccattttggtcaggttggtctcaggtgatcctgacctcaggtgatccgcccgcctcagcctcccaaagtgctgggattacaggcatgagccaccgcgcccggccatttttttttttttttttttttttttccagaccgggtctcagcattatccagactggaatacagtgatgcaatcatggctcactgcagtctcccaagcagctgggactacaggcatgagccaccacgccggccaattgttgcattttttgtggagtcagggtcttgttctgttgtccaggctggtctcaaactcctgggctcaagcaatcctttcacttcagcctcctaaagtgctgggattacaggtgtgagccaccacaccctgcttcaaagataacatttgtcctggcgaacttaatcctactaagcaggtttgcttcgctttatgtaatatatgatgttctttacattgtaatcactgagatttgctgacaaaaagtaataataggccgggcgcggtgcctcatgcctgtaatcccagcactttgggaggctg[132 bp omitted]ctgaggcatgagaatcacttgaacccaggaggcagaggtttctgtgagcggagattgcaccactgcactccggcctgggcaacaaagtggactccatctcaaaaaaaaaaaaaagtaataggcagatcacaagatcaagagattaaaacaatcctggccaacatggtgaaaccctgtctctactaaaaaatacaaaaattagttggccgtggtggcacatacctgtagtcccagctacttgggaggctgaggcagaagaattcgctcgaacccaggaggcggagtttgcagtgagcctagatcgtgccactgcactccagcctggagacagagtgagactctgtctcaaaaaaaaaaaaaagtaataaaagcaataataataaatgtgtatgagcttttagaaacacgatgctcatcatcgcaggttccagggtaggtgctctcagcacaggttctctgacttgctcctcaaagcttccctttgaaatggaactattaatacatttcccaaatctcctgtttattaacgtaaacatccctgcgaagagcactggctaacgcctgttatcccatcactttgggaagctgaggcaggaggattacttgaggccaggagttcaagaacagcctgggcaacattgcaagaccctatctctacaaaaaaaaacaaaaaacaaaaaaaaaaaacagaattatttgggcatggcagtacttgtctgtcatcccagctacctgggaggctgagatgggagcattgcttgcgcctaggattttgaggctgtagtgagctgtgatggtgccattgcactccagcctatgagacagaacaagaccctgtctcaaaaattaaaataaaataaaataagttatatatcccaggcttctgcctgggcccagaaaacctgtctctccagggtggggacttgaaagaattttctttcttttttttttcttttttttttttttttgagacagagtcttgctctgtcatccaggctggagtgcagtggcatgatctcagctcacttcaacttctgcctcccgggttcaagctattcttgtgcctcagcctcccgagtagctgagattataggcgcctgccaccacgcccggaaagcagaatttttaacaaagggtctagggaatttttgttagctgggaaattgggggactcagatgcagagactgtttgacaaaaaaaaaaaaaaaaggaaagtgagacaccacaaagaagaggaggtgacttgcccaaagttactcagccagaaaggagcagggccaggatttggtccagagaggagcaggaactagtccagggtcacggagcaggtttcagatgagggctgagactggcgcccttcactgtcccgagcaggtccgcagtggctcctcgcctcccccattaagccacgaagctctggtggcgccgggggccctcaggttccaccagccgtgggtggggaggcagactatacccctctcagccccaatcccttccccctcacccaagctgccttttctcaaataaccacactggggagggcagggagtcggggtgaccttgaggccagaatacacaatggcccagtccctctctggagccctgccagggagaggaaggaagcctgccctgtttttttccatggactggaatgttgattcaggatggagagcagggaggagggaagggggaggtgggagagagagaaaaaaaaaaaaggaggaaagagaagggagtaggaggagggtggaggagggagaaaaggggaacagggcaaaaagggagaagaaggaggtggaggaggtggaggaggaggagggatggggaggaagaggagaagaaagaggaaggagacagaagaggagcatggaggagggggtgccaaggccagactttgggaaccaaggaatgagccccatcagcttcagcccatcctgacacacagtgtggagaatgcagagtccagagagggcaccccaaatctgcaaggttgcacaggaccagtgcagccaaagggcctcacctgtgcggctgcctcctgcctgtggaggcaggagctccctgagtcctcacagagaccttcagacgcaggtgtcatgttgcatgtttctcagaagaggatactgaggcgcccagaggtaaagccacatttcctggagcatctccccttcggatcggactccagggtccttacaatggtctgcaggcctgcccgcccgtcattcccttcatcatctcctctccttcactcactgcagccacctggcctcctggctattgtttgaacaaatcaagcaactccttcctcggggcctttgcactggctgttcccgctgccaggaatttccttccctcagacacctgcatcactccagtcaggtctctgctcagatgtcacctcctcagaggggtcccctgtacacccaaagttgtctggctttattcttcacagcatttatcacttacacaactaacccaactttacattttatatttcttttttgttttcttttttgagacagtcttgctctgttgcccaggctggagtgcaaccgcacaatcacagctcactgtggcctcgaactcctgggctcaagcaatcctcctgcctcactctcctaagtagctgggactacaagtgctcaccaccatgacctgctaattttatatatatatatatatatatatatatatatatatatatatatatatacacacacacacacacacacatatatatacacatacatatatatatacacacaaacatacatatatatacatacatatatatatatgtgtatatatatatatatatatatatatatatttttttttttttttttttttttccctgagatggagtcttgccctctcgtccaggctactagagtgcagtagtgcaatcttggctcactgcaacctccacctcccatgtccaagtgattctccagcctcagcatcccgagtagctgggattacagtacctgccaccaggcccaactaatgtttgtatttgtgtagagatggggtttcaccatgttggccaggctggtcttgaactctatctagaatatacaatatatcaaacatttcaacacaaaaaaaaaaatctgactttttttttttggagatgtaatctcaatctgtcacccaggctagagtgcagtggcatgatctcagctcactccaacctctgcctcccaggttcaagtgattctcctgcctcagcctcctgagtagttggaactacaggcttgtaccaccacgcccagctaatttttgtatttttagtagagtcggggtttcaccgtgttggccaggctggtttcaaattcctgacctcaagtgatcgacccgcatcggcctcccgaagtgctgggattataggtgtgagccatcacgactggccattttttgtctttttgatgacatcttgctctgtcatccaggctgagtgcagtggcgcaactatagctcactgcagcctccaattcctgggttcaagcaatcctcccacatcagcctcccaagtgagtagctgggaccaccactgtgcaccaccacacctggctgtttttaactttttgtgcagacagggtctcgctgtattgctcaggctggtctcgaactcctggcttcaagcaaccctcctacctctgcttcctaaagtgccaggattataggtgtaagccaccatggctggccaacaatataattttttaaacaggcaaattatcttaacagacatttctcaaaagaagacatacaatggccaacaagtatatgaaaaaatactcaacatcatactcattggggaaatgcaaatcaaaacaacaatgaggtattatttcacctgagttaggatggctgtcatcaaaaagacaaaaaatggccagttgtgatggctcacgcctgtaatcttagcacttcgggaggccgatgtgggcggatcacttgaggtcaggaattcgaaaccagcctggccaacatggtgaaacttcaactctatttttgtaaaaatacaaaaattagccaggcattgtggtgcaagcctgtaatcccagctactcaggagcctgaggcaggagaatcacttgaacccaggaggcagaggttgtggtgagctgagatggcgccattgcgctccagcctgagcaacagagagaggttccctctcaaaaaaaaaaaaaaagaaagaaaaaaaaaaaggagcagggattcagcttttgagggccatggcgaggattttggccatcaccccaagtgaagtaggagccacagaggctggatgggttctgattcagtttcttttttttttttagatggagacttgctctgtcgcccaggctgcagtgcagtggcgcaatctcggctcactacaacccccgcctcctgggttcaagtgattctcctgcctcagccttcccagtagctgggattataggcatgtgccaactcacccagctaattttgttgttgttttgttttgttttgttttttgagacagagtttcactcttgtctcccaggctgaagtgcaatggtgcccactcagctcactgtaacctctgcctccggggttcaagtgattctcctacctcagcctcctgagtagctgggattacaggcatgcactaccacgccaagctaatttttgtatttttagtagagacggggttttgccatgttggccaggctggtcttgaactcctgacctcaggtgatccacctgcctcagcctcccaaagtgctaggattgcaggtgtgagccatcatgcccggccctgattcaggttctaacaggatccctctggccatgaggtggaaagagactgttgggggcagaattgtaaagcgagggacaagaagagtcaggggtctccaagctttgagcctgagccactgcaaggatgaagctgccatttctgaggccagaaggctgcaggcagggctgggttggagattggaatgaagataggtcttgtttgaggccaatgaggagggagcctcacccgaggcacacaggctccaggcgggaagttggcgacaagttgtggactgtggttttcacccacctcatggggccccctcatcctctcccccaacttcccctcacgccgtggtggagccagctttgtttgtttcccccccatcatccgtttcatgatggggaagactggttttcccctaacccaacagacacctcttccctcagcctgtccctgaccctcccacctcgggaagccccgagcgggcctcccagaatgtcccggcaggaaggggctgctgctaccgttcatccagccagatgaaccccaaaaggggaagtgggtcacccgtagtcacccggctcatggtcagctcgggacttcaggatctcgtctcttcactgcacccaccacagccctgggaggttttccatgcacgcttctcattctccccacatttcacacgagaaaacaggggctccaagagaggcccacactcacctaaggagctccaaagataggggcatctggatttgaacccaggtcctagcagatgttgttagctcagaggagaaggcagagagggtgaacagaacccagcctgccctcccagatccagtgggaaggcagacttgtccccaggtaataatagcccagcagtgttcacagcctgggatggaggagcccaggaggctgcaggagctcagagcgcatgcctgacccagcctggggtcaaggagggcttcctggaggaagggacagctcatctgatacctagaggatgagtgggagttactaggtgtaaatagtgcagggagagggaagagtatgtgcaaaagcctagggttgagaggaaacctaggggctccagcaaggcgcagtggctcatgcctgtattcccagcactctgggaggccgaggcgggcggatcatctgaggtcaggagttcaagaccagcctggccaacatggtgaaaccctgtctctattaaaatacaaaaattagccaggcgtggtggcgtgcacccataatcctagctacctggcaggctgaggcacgagaattgcctgaacttgggaggtagagattgcagtgagccaagatcacgccactgcactggcgacgaagtcagattccatccctctctctcaaaaaaaaaaaaagctggggggagcctaggggcttctaaatccgatcgtgtcctggccctgattaaactctcctacagctgccctggcaaactctttagcttggcattcattcattcattcattcattcactcattcattccataaacattccctggagtgcattgtcagtgtcaggccccaggggaacacagcagtgaccacgacagccccaccagaccatgaccctgaccagggggctcacgagggcggagacatctactccaagacctgaaggaggagtaggagagatgctggggaagaggcagggaagggtgttcctggcagagggaacagcctgtgcgaaggcctgaaggtaagttttgcatatgacacctttgagaaactacttattgttcaactgaagcatagggttgttcagaagaagccagccttgtggccgggtgtggacttcctcccagggcaccagggagccactgcagagttgtgagcaagggacagacagaggtaggcttgtacttccaagagactcccccagctgccacatgcagggtgaatggaatgatgcacagaatccagtttcaggggtagtttggtacttggacccaggtcccagggagagagtccaaggagcccttctctggtcttccaaggagctgctctccccaagctccggatggaaggcgtgcccatggcaaccgctaggtggtgcccgtacaccaccagccaggtctttttttgccaaaagtagatcaggcccagagctgggcagaactgcccctgggtcaggagagcaaatcgtctctgtcttttggtcctggctccctggccaggcatcctggggccatttgactcccaggctcaggaaggagctggctgagctgcagtgagtatgttcttcgtctctttcctcaccttggaatctcagacgggagcaccctggctcccacttcagacaggaagattcttacctccctcatcagactagcaggctctttgtctccccaccagtttgaggggctccccatttctatcattcatttggaagctcatcagctctcccagaaggcatgggagcccttcaacacccccatcagactaggactacccatctcccccatcaaattagaactgcattgtctcacacatcaaagtatcactcctggccaggtgcagtggctcccgcctgtaatccaagcactttgggaggccgaggcaggaggatcacctgaggtcagaaattcaagacaaacctggccaacacggtgaaacccggtctctactaaaaataacaaattagccaggcgtggtggtgtgcgtctgtaatcccagctactcaggaggctgaggcag[138 bp omitted]ctcccctggcagactggaaatatagactggacactcgttcttgctgcacaggactggagcttcttatcttcttcattggatttggacagtcctgtctccctcatgggatttggtgagagctccttagtttccttatttttcccactgtgttgggccaccttgtccccaccatcagattggggaacaccttgtctcccagtcagaccagaggggcggactcctctgcccttgcaaaggttcctaggtccttcttacatccataggaggaaccatgcctattttaccaagagggaaactgaggcacagagaaacaaagcaccacttctctgtccagctgcagatgcctccacctccccctccgcccgctcctctgcccctgccctcccccgcccccgcccctgacctgggtaactcccctggcaccgggagtaggggaattttgccctgctggcctctgcaccaaccacctccccttatcggcagcgtcgccaccagtggcggcccagggttaaagtccggagagagctccgggcgcgaagcggatagggagggaggagtggcgcccaacccagaacggggactccccggaggtcgagccctcacgctgctgggaggagaggggatgggcagggccgtgtcccatggtaaggtgtgggttcaatccttcctttctagttcccggctgtgtggtcttgaacctggaacttcaccccaactgggagcctcagcttctccagctttaaggagtcaggggcgtgaaaatgtccaagctctggagtcagactccaggagtttgaatgctggctcctataacctgctgtgtgagatctggggccagcgagtgtgtctctctcagcctcagtttccccagctgtgcaatgaggatacctagtgggtggtggtgaacgctccatgagtttacgcacaagaaaaccttgggacagtggctgatagtggcgccagcaagccagcatgcaccccaccctttccttccaagaaaattgcctcctaaatctatgattggtaaccttcacccctccctctttgacccacctcctaacccaggccacctggtgtcttgctgcacagctggtctccctgcccgcaccacacccagaggcgtccttggaaacccaaccctgacccctggtcagaatctgccatggctccccagtgcccccaggagaaagccaagtgctgtgccacagccacagcctgaccactcactgcttgtatttttttttctttttctttcttttcttttctttttctttttttttttttttttttaagacagggtcttgctctggccccaggctggaatgcagtggtgccatcatagctcactgcagcctcaacctcctgggctcaagcaatcctcccacctcagtctcctgagtagctgagactacaggcacatgccaccacacctgggtaaatttttaaattttttttttagcgatagggtctcactcattgcccaggctggtcttaaactcctgggctcaagcgatcctcccgcctcagcctcccaaaatgcttggactacaggtatgcaccaccgcgcccagcctcctttctggttttctaataaagccttttgttcacctccttcaaacacttccccatgctcttcaggtctcagctcaaacaggccaggcccggtcccctgggtcctctctgtcctccgtctcctggttccctgtacctctccaaaagcccccacgaccaaaagaagtaaagatgtagggccgggcgcggtggcctacacctgtatttcccagcactctgggaggctgaggtaagtggatcacctgaggtcacgagaaccgattgaaccccagaggcagaggttgcagtgagccgagattgcgccactgtactccagcctgggcgacacagagagactcaacctcaaaaaaaaaaaaaaaaaatggtggctgggcaaggtggcttatgcctgtaatcccagcactctgagaggccaaggcaggcagatcacttgagcccaggagttcgagaccagcctgggcaacatggtgaaaacccgtctctacaaaaaatacaaaacttagctgggtgtggtggcatgcgcctgtaatcccagctactcaggaggctgaggcatgagaatcgcttgaatccgggaggtggaggctgcagtgagccaagatcatgcgactgcactccagcctgggtgacagtgcaagactctgtctcaaaaaaaaaaaaaagttcccactctggtccagccaccatcactgaaggcccggaccatgcagtcacctcctcatgggactccctgcctgggtccttgctgcacctccacaaggacctgtctttcccccacatgcagccacagggatcctgttaacacctaagtcatcagaaggctgaggcgggaggatcgcttgagcccaggaggtcgaggctatagtaagccaagatggcaccactgtactccagcctgggcaacacagtgagaccctgtctctaaacagtaataataataacaaattaaattaaattaaaacctggcctgggcatggtggctcatgcctgtaattccagcactttgggaggccgaggcagatagagtacctgaggtcaggagttggccaacatggtacctgaccaacgtggtgaaaccctgtctctattttaaaaatataaaaattagctgggcctggtggcacatgcctgtaattccagctactcaggaggctgaggcaggagaatcgcttgaacctgggaggcggaggttgcagtgagcccagatggcatcactacactccagcctgggcgacagagcgagactccatctcgaaaaaaaataaaaaatgaagtcagattatccctcccctgcccagaaccctccatggctcccatctccctctgagtaaaagcctatgtccctacagtggctcataagatcctgagccatctccttgccacccttcccctctccccatcctcccactctcccccagctcatcctgctccagctacactggcctccaacagctgttccgacccacctctgggccttggcacttgctgttccctctgcctagaatactcttcccccagatgtccacatggttcattccctcccctcactcaagtcttagccccaaacgtcattccttggagggcctcccttggccaccagatttaaacaacagcttccacttcctatgctccatctccctcattccctcaccagttttatttttctccatagcaaatacataccattggctgtattttccttgtcttgttgactgtctcctggatggatggacgagtctgtggctccccaagggcaggaatcttagttgttcaacaccagggcagggcctggaaaacctgttagcagagtgaatgaattgtgtgtgtgttttgaaaaggtaaggtgttcacaagttccaaaattcaaaaaggaccaaatggcagtgagctgtcacttccccaccacgactctgcccctccctccccagtcctgttctcacctcccagtttccgtttttttgttttgttttgttttgagacagggtctcactctgtcacccaggctggagtacagtggtgccagcatagctcactgctgcttccacatcctggactcaaatgatcctcccacctcagccgccctagtagctggggccataagcacgcaccaccatgcccagctaatttttgtatttttggtagagacggggttttaccacgttgcccaggctgatctcgaactcctgggctcaagtgatccatccaccttgcccttgcaaagtgctgggattacaggcgggggccgctttgcaaatggtgcacagtcttgctgtggcctgcattttcccctagcaatacagcaatacatctggaaaatcacaccgcatcagcaccttcttttttttttttttttttttaataattgcatgcacagtgtcgacttgtggacagacgagagctcttgccgcaattgttattatatttcaggagtggtgtggcgtggtgcctaagacctcagtgtcatctctcagacccggattcacctcgtagctctacagccagaactcccacaggctgctggtgggcgtgcaagccccgagcagccactttggaaaatggtttgccaacttcccgcaaggttaaatacacacttcccataggatccaacaattttattcctcggtattgacccgagagaaatgaaaacctattttcacacaaaaaaactgtatgcacacacactcacagcagctctgttcataattgccaacaactgtaaacaacccaaatgtccttcagcttgtatgtggataagcgagctgtggtccatccacacaatggaatatcactcagcagtgaagactaactgctattgatacacacaacgtggatggacctcaactgtgttat[137 bp omitted]atggtgagaccccatctctataaaaatattgatgatgatggtgatgatgatgatgatgataatgataataactacattactccatttacaagacactctgaaaaaggcaaaactagagggacagaaaacagacctgtggttgccaggggtggggtgggggatgggcgtgaccccaaaagggcagatgaagggttttaggggtggtgggacatatccatattttgattctggtggtgactacacagccacatgagcctgtcaaagctttaagaactgcatgccccacaggcacttcgagaggccaaagcaagaggccaggagttgaagaccagcctgggcaacatagtgagaccccatctctaccataaatacaaaaattagctgggcttggtggcgtgcacttgtagttccagctaatgaggaagctgaggcgggacgatcgctagagcctgaaaggttgaggctgcagtgagtggtgatcgcaccgctgcactccagcctgggtgacagagtgagaacattcctcaaaaaaaaaaagaaagaaagaaagaaagaaaagaaatgtatgatgaaaagagtgaattttactgtaggtaaatttgtcaatgatttttttttaaggactacatactctgtaatcccatttacatgtcatcctggaaaagcaaatttatagggataaaaagcagctgggtgtggcggctcacacctgtaatcccagtactttgggaggctgaggcaggtggatcacttgaggtcaggagtttgagaccagcctgggcaacatggtgaaaccccacctctactaaaaatacaaaaattagccgggcgtggtggcaggcacctgtaataccagctactcaggaggccaaggcaggagaatcgctggaacccgggaggtggaggttgcagtaagccgagatcgtgccactgcactccagcctgggtgacagagcaagaccccatctcaaaaaaaaaaaaaaaaggcagatatagctgagtgtggtggctcatgcctgtaatcccagaactttgggaggctgaggtgggtggatcacttgaggtcaggaattcaagaccagcctggccaacatggtgaaacctcgtctctactaaaaatacaaaaattagccggacatggtggtgcctgcctgtaatcccagctactggggaggctgaggcagaagaatcacttgaacccgggaggcagaggctgcagcaagcagagatcgcgcccctgcactccagcctgggtgacagagcaaaatgtctcaaa[148 bp omitted]cccgtctctactaaaaattcaaaaattagccaggcatggtggcgggcgcctgtagtcccagctactagggaggctgaggcaggagaatcacttgaaccagggaggcagaggttgcagtgagccgagaccgtgccactgcactccagcctggcaatagagtgagactccatctcaaaaaaaaaaaaagaaaagaaaaagcagattagtggctgccagtgtctggggacaaggggaggagatgactgcaaggagggcacagtggaccttttccgggcactagaaatgttctatatcttgatcaggatatgattaaatgattgtacatgtttatcagaactcatctagcatactccttctttaatttaattttaattaatttaattgatttatttttgagagagtctcgctctgtcacccaggcaggagttcggtggcaagatcacagctcactgcaatctccacctcctggattcaagtgcctcagcctcccaagtagctgggattataggcatgcgccaccatgccccgccaaacacacacatttgaaacaggtgtattttattgcatgtaaattatacctcagtacagttgatttttaaaatctaaactcctggccaggtgcagtggttcaggactgtaatcccagcactttgggaggctgaggcaggaggatcactggagcccgggagttcaagaccagtctgggcttcctggcaagaccctgtctctacaaaaaaaaaaaaaaaaaaatgcaaaaactagcagggcatggtggcacatgcttgtagtcccagctactcaggaggctgagggggaaggatcacctgagccccgggaggtggaggctgcagtgagtcgtgaatgcaccactgcactccagcctgggtgacagagtgagaccccgtctcaaaacacacacacacacacacacacacacacacatttagctcctcttcccccttattggctgtgtgaccttagacaaagctcctaacttctctgtgcctgggtaaatgatgagggagttgggaaggagggaatgatcactgagggcaggtgctgaggtctcaggtctcactgtggattcatgcaagaaacgtttacaagtgaaacagaggggctttatgagcttttagaggggaactggagacagagacctgagcagctgacaatggctcctatgtctccggagggcaggtggtgggctgagcactgtcagggcctcacctgcatccctttgaaccatcgggcactcctttgctgacctggaaaagtgagtggagccatccctgggatcccagagaaatggcatcgagggcacacaattaagagcattgtaagcaagccttgtgaacagtcagatgggcttgacagccccgtgcccagaggtctctgctgtttggggcagtgctggatacacacagcagtgacagccccaggcctgccctcacaggctcacacatggggaagactagcctgtccccagacagtcgcatcccagaatgttggggctggcatggtcaggggggcccagagggggctcctgactcagactagaaagagaaatcagggagggcttcctggaggaaaggctgtcagagctggggcctgatgtgtttattgagcacttactgtgtgacctggtttggatctccaagaaagaggtatagttttgacgttgaagtgaaaggggtatgtatggaaggaggatggtgcgagagaggccttggctaagaggcagaaaggggtgtgggtgggacagagccgggggataaggctgaaggaagacggtagctggtgtgggtcctctgcggcaggatcctggactttctcccgatgatggggctcaggaaggagcagcttcctcaggttccatcctgtgcaaagggaggaccaggcaggaggaggtggggaggctgaggaaaggccatggaaatgagaagtggctataagagccacccaggggaggggacacagggagggtgagaagacctgggcgcccgctcctttctcttctctgttctcactctgagctagacggcattggccgggcagcttccttgtttctaaaagtttaagataaagggcaggcaaggtggtgcctgcctgtagtcccagtgctttgggaggcccaggcaggtggatcacttgagcctcctgtttggagctgtagtgagctatgatcacatcactgcactccagcctgggtgacagagcaagaccccatatctaaaaataataataataattaataataaatataaatttaagatagtgaatctggccgtgcgtagtgactcatgcctgtaatcccagcactttgggaggctaaggtggacggatcacctgaggtcaggagttcaagaacagcctggccaacaggacgaaaccctgtctctattaaaaaacacaaaaaaattagctagcgtgcacctgtagtcccagctactcgggaggctgaggcatgagaatcgcttgcacctgggggacagaggttggcataagccaagaccgcaccactacactccagcctgggtgacagagtgagactccatctcaataaaaataaataaataaataaataaataaataaataaatagtgaatcttaagtttgccaaggatgcatttttatctctctttagttcttaagactctgatcattcttctttttttttcaagttccagggtatatgtgcaggatgtgcaggtttgttacatagtaaaaatgtgccacggtggtttgctgcacccatcaacccatcgcctaggtatgaagcccgtcatgcattagctattcttcctaatgctctccctccctctgcacccctccccatcccaacaggcctcagtttgtgttgttccccttcctgtgtccatgtgttctcatcattcagctcccacttataagtgagaacacgtggtgtttggttttctgttcctgcgttagtttgctgaggataaatggcttccagctccatctgtatccctgcaaagcacatgatcttattccttttcatggctgcatagtattccacggtgtatacataccacatttttctttatccaagacttcgatcattcttaatttttatttttattttatttatttatttatttatttttgagacagagttttgctcttgttgccaaggctggagtgcaatggtgcaatctcagcccaatgcaacttcctcctcctgggttcaagtgattctcctgcctcagcctcccgagtagctgggatgacagccatgcaccaccatgccgagctaattttgtatttttagtagagatggaatttctccatgttggtcaggctggtcttgaactcctgacctcaggtgatccgcccaccttggcctcccaaagtgctgggattataggtgtgagccaccgtgcctggcctaatttcttaaattctacccatttttgctcctaaagttctgtaactgcaggtttacttgatcctttgatactaagattcattcattcagtaaatacttactgggcctctattctgccctaggtcctaatgatacaagggagaacaaaatgtataaaatttttgccatgacagaaatcacatttactgagcactcactgtgtgccaagtttcatgccaggtgtacacatataacattacctacatgatgagttacagacttctattatccccattatccaaatggggaaactgaggcatagggttctggaatcccttgttcctaaaaatctaggattctagaattcctctccttctccttcctcttcctcttcctccctcctcctcctcctcttctccttctccttccccttccccttccccttccccttccccttccccttctccttctccttcttctttttgagacagggtctcactgtgttgcccaggctggagtgcagcggcatgatcatagctcactacagcctcaatctcccaagctcaagaaattctcccacctcggtctcttaagtagctgggaccacaggcagggtctcactttgttgtccaggctggtcccaaattcctgggctcaagtgatcctcctgtttcagcctcccaaagtgctaggattacaggcatgagccaccgtgcccagcctagaattctttgcacctaagattgtaagggtctataattctttgtccttaagattctcttatgcttggattcaagtgaacaatgtatataggaaaaggtgctgaatctcattattgatccaggaaatgcaaattagaaccaccctgagattccaatccacacatacacacagcaggatgactcatatttttaaatctggtagatccagtactgataaagatgtggggcaaggagaactcacagcggacattgaagatgggagtgagaattggcataaccacgtgggaaaagtgtctggccatgtcttctacaggggacaccctgcagcctaacaattctagtcctggagaatgcagaaaaatgcacgctcatgagcatgagcagtattggccaaaacagtcagaaagtggaaaccaaccttctgcccaccaacaaataatagattcaaaaattgtgctatacagccgagcgcagtggctcaagcctgtaatcccaaaactttgggaggttgaggcaggtggatcacttgaggtcaggagttcaggaccagcctggccaacatggtgaaaccccatctctactaaaaatacaaaaattagctgggcgtggtggcacatgcctgtaatcccagctactctggaggctgaggcaagagactcgcttgaacccagaaggcagagattgcagtgagccaggatcatgccactgcactctagcctaggtgacagagcaagactcagtctcaaaaaaaataaaataaaataaattgtgctatatccatgcaagagaatagtatacagcaatgaaaaaataaacacactccaatagattcaaggatatgaatgaaaagccaggcaaggtggctcacacctgtaatcccagcactttgggaggctaaggggtatggatcacctgaggacaggagtttgagaccagcctggccaacatggtgaaaccccatctctactaaaaatacaaaattagccaggtgtggtggtgcacacttgtaaccgtactcaggaggctgaggcaggaaaatcacttgaactcagaaggcagaggttgcagtgagccaagattgcgccgttgcattccagcccgggcaaaaagatcgaaactttaaactttagctcaaaaaaaaaaaaaaaaagaaaaaacagaaaagaatatgaatgaaattcacagacataaaattgagtcaaagaagccagatccaagaggttgtacaataagattccctttaggacaggcatggtggctcacgcccgtaatcccaacactttgagaggctgagccaggcggatcacctgaggtcaggagttcgagaccagcctgaccaacatggtgaaaccccgtctctgctaaaaatacaaaattagccgggcgtggtggcgcatgcctgtagtcccagctactcaggaggttgaggcaggaaaatcgcttgaacccaggaggcggaggttgcagtgagccgagatcgcaccattgcaccccagcctgggcgacaataggaaaactctgtctcaaaaaaaaaaaaattagctaagcatggtagcaatgcacctggggtcccagctagtcgggaggctgaggccagaagattggctgaggccaggagttcaaggctccagagagctatggtcacacccactgcactccagcctggatgacaaagcgagaccccatctaaaaaaaaaaaaagatttcctttattaaaaattcaaaatcgtagtagtcgtaggtagcaaaaatataaagaaaagcaagaaaattataccataaaagacaaaatacaggtcacctttccaggagggagggagctgtgaggcatgaagaggcatgaaggagcttctgaggaactagcaacactatttctctttttttctctttttttttttttgagacagagtcttactctgtcacccaggctcgcgtgcattggcgcaatagcaatattgctcactgcaacctccgcctcctcggttcagctattctcccagcctccagagtgtctgggaccacaaggcgtgcaccaccatgccccactaatttttgtatttttagtagagatggggttttgccatgttgcccaggctgctctcgaactcctaacctcaggtgatccgccccctcggccttccagtgctaggattacaggcatgagccaccgcgcctggcccagcaacactttcttaacctaactgtttcctttacaaaagtctctgaaacagaacaatatattttaattgtacgcaattctccccatgttatatttcataattttcagggatttttttttaatcccacgattccaaatctctgttcctcaaatgacgtggctctccagggggcggtgggcaaaagttctgagccctggcatggagccctggcacagagacctggtgcacggtgcaccaggaacccacaggagaatttgggatctgaaacagcaaatacaatttgattttcccagaagtgagcaaatgtgctgtgactctgtgtgaccacagtgggctgaagtgacaagttcaagggtaggtgatgttcagagtagaggccacaagccagcgcctccccgcccccaccccacctcctgcagagcgtgacgccagtaagagtggtcatctatttctcttcccaccagccaccccagagcctggctctccctgggaggagatgcaacctcaacaatcctgggccagtcccattctttttggatgtggaaattgagcctgcccaggattgcttggctgagaggctgccgtgttgggatttgctcctgacttgcaaccacctgactccacagggatgaggcagtagagacagccctgccccatcctcagtatcctgggaatgtgttggagggtatgggtggccccgactgggacactgggatgacggttggaaacaagggaggtgagtgtgccatgtcccggctcaaatgaggaagggcccagtgtgacctcggctttcccaggagcctgagggacttttgcatctgtatttttaaatgctggtggccacagggcaggttgtggccttgagtaggggaggcaccgacttccagggaaaaggctggagtttcaggaaagggactgtccctcctggataggcaccatgctccaccctgccagggtgggcttgagaagaggggcttctaattcaatgggagggctcctacttagggagtggctaggctgataggggtggcatgatttcccccaactcaagtcaagaaggaaccactaatctgatggaggaggcacataccagctccctcctggggaaatttatatttcctagtctaatttgatggacaaaacttaattttactcggacagcactcctagtcccaagaaggattcaagatttacagcgtagtgagctctagtctgatggaggaggcaggacccaaacccacccacagggaggtttcctatgagggtggaggcatgcctgttatcttcaggaagctctagtctagtctgacattcatccaaatgtcttctggggaggaggggcaaaattgctcccctcaattgagaatctagacagaggagggagtcatgctgccccaccccatttttttttccttttagatctagtcctgaacccagatgccccatgcatcttcacggaaccgatgggagaagcaaaatccacttttagagatatctaatctgtgaagaagtcacactttcattctcagggagattctgatctgatggaggaggaagaatgcaattcaaaccctcaaggaactcttacactgatgggaaacatgtccccaccttgggggcctccaagtctgatggcagaggtcttcctcccatccttgggaagctctagtccaatgagggaggcactcccccaccatgtcagtgccttccttcccgtaccttctccctgccctctggctgcccgaatgagcagggcagggggcttcccctccccacctccctggtgaatcctagaatcagggaacttctgcaggaggacaccacggttccccagccctgggacttccctttctccgtcagcccaaacccagggcctcactgggggggccagacatgcctgccctgctgatcatggctcacctatcaccccagcccccatgacatcacctggttattgcatgtccacagcatcccaggctccgcggggactttccatgcttgacctcgccagtgccctaccctgagagggaggagtctgtccccactttacaaacaaagcttagagggcatggcactcttgccagagaccacacagccagaaactggcagagtggggaacagaccaagtgggtctgactccagagccccagctccttaggaatgaggatgaggatgatgtacgtatacagtcctcattttctgccaggcaatcctgccaagggctatattgctgactcactagctcttctcggccatggtgttattattctcattgtcattattctgtaactcagacagggaaactgaggcccaaagagatagatgagtatgtagcagagccaatactcagtcaggttgtctgactccagtgccatcatcacagctcagctcccccagaagacagatgattatacggaattgggcatgcgaaagatttatggaccagcctgggaaacgt[142 bp omitted]catcgagaaaccccgtctctactaaaaatacaaaattagccaggcgtggtggcacatgcctgtaatcccagctactcgggaggctgaggcaggagaatcgcttgaacccaggaagcagaggttgcggtgagctgagatcccgccattgcactccagcctgggcaacaagagcgaaactccgtctcaaaaaacaaaaagaaaaagaaattagccaggcatgatgacacacacttatagtcccagctactcaggaggccgaggtgggaggatcacgcctgtggtcctagctactcaggaggctgaggtgggagaatcgcttgagcccaggaggctaagactgcaatgagctatgatcgcaccactgcacctcagcctcagcctgggcaacagagtgagaccctgtctcttacatacatatatatctcttaaatacacacacacacacacacacacacacacatatcttaaatatatatatgtgtgtatatatatacatacgtgtgtgtgtatatatatacacacacatatacatatatatacacatatatacgtatatgtgtgtgtatatatatgtgtgtgtgtatatatatgtgtgtgtgtgttgtgtgtgtgtgtatctatctatatatatatatatgcagggcacagcacctcagaaaggaaaggaggaagcaagaggagtgagcaagggggactgtcaagttgtaatgccccccctacaggaaggctcttgcattagagaagtcccaccctggtcagaaatggctagcacctctgaaccccacctgtcattggctggagactgcccaggagaccatgccccagccggtaagctgaagcagacctcaaaggagtcaactgccaatgtcagaggctgtctgctctctctgcatgcctggcagcaagatcaaaagtccgttttttttgtttgttttgttttgtttttttaaatttctgagacagggtctcactctgttacccagggtggagtgcagtggcatgatcatagctcactgcagcctcagccccccaggctcaggcaatcctcccgcctcagcctcccaagtagctgggaccacaggctcaccaccaccatgccaggctaatttttatatttttttgtagaggccaggcatggtggcttatgcctgtaataccagcactttggggggctgaggcaggaggatcacttaaggtcaggagtttgagaccagcctggccaacatggcgaaaccccatctctactaaaaatacaaaaattatccaggattggtggcatatgcctgtagtcccagccacttgggaggctgaggcaggagaaccacttgaacccaggaggcaggggttgctgcaccactgcactccagcctgggtaacaaagtgaaactttgtctcaaaaaaaaaaaatttgctgggcatggtagtatgtgcctgtagtcccagctacttgggaggctgagccaggagaatctcttgagtctgggaggcggaggttgcagtgagccgagatcacaccactgcactccagcctgggcaacagaacaagactctgtctcaaaaaaaaaaaaaatgtacttttttgtagagacggggtcttgttctgttgcccaggctggtctcgaactcctgggcccaggtgattctcccatcctggcctcccaaagcactgggattagagggatgtgccgccacacccagccaacaggttttttcttgaagggggatgtgagctgcctgtctctgtggctgccactcccatacctatatgaataataacaatcattttaaaataatatcttccatttactgagactttcctctgtgccaggcctgtgctgacgtgtgtgaattcatttgactctcacaacaccgccggaagacatgcactgtttttaccctcattttatagatgaggaaactggggctcagagagggtaaataaatcacctgcccagggtcacacagctggtaagtgacagaactgggattggaacccaaacaattagacagggccccattcacagatgaggacactagcccactagtacctgattgtctactgtcacctcgctgagaccactgtgaccttccttcctatgccccgccttcccagacccccatccacccacccagggcagatgctgatctccacactccccccaccgaatcacccctctctgatcaaggcagctggcaggggcggcggagagggtggggggacgagggtgtccagtctccctggcctgccaagagaggatgtcgcaatcctctgactcagcgtcgtgcgtgcagacccagcaagaggcagaaaggggaagattaagtcttggcttaggccccagatgggctgattctgctcaatgccaggagctcccagagctgccaaggctccagggtggggaggaaccaggaggtgcaggccatgctccaggaagctggcccgcattcacccgtgggggtggggcagagcagcctcagggagcggagccgtgtggacttccagcccagggcccagactggaggcagcctgaccttgggcatgtcccttcccatccaggcccagagtctctgtatccttctgtctgcggaattcacttgctctccctgaacctctctggaggctctagtggttgttcctcctcaagggactcttaagtctaactctatttttttttcttttttgtttgagacagggtcttgctctgccacccaggctggagcgcagtggcacgatctcagcccactgcaacctcggcctcctgggttcaagcgattctcctgcctcagcctcccgtgtagctggcattacaggcgcccaccaccacgcccggctaagttttgtatttttagtagagacggggtttcgccttgttggccaggctggtcttgaattcctgacctcagatgaccctccagtctcagcctctcaaagtgctgggattacaggcgtgagtcaccatgcccggccccttaagtctaactctattccctcctgctgcaatgccatcctctctccacgcacggaccctccccataccaggaggcagcagagaagagttccagggtgcgaatctccatgggtgtcctcggacatatgactttccctctccatgcctcagtttccccatctaaaccatttcttcccagggagaaggggcctagaatcaagctggaagggcacacctgcagtctccgagactcatggccacttctcccaggtcagaagcgtgctggggtcacagggacctggcttgaaatctcagctctccccagttcctcaccgtgtgacccgggcagtgagttcacttctctgtgcctgtttcctcctctataaaattgggtttttagctgaattttccttacaaggtgttaagaggattaagtgggccaattcttagttgcaactcagcccggagtgaatgtttctgtcttgtctcctctgtgagtagaaaagggtgagaaggaggccctggtctgctggatagggtaagggttaaggccagcagcgtggagacagaaatgaacattattcattcatttattccacacacttttcttatttaatctgctcagtaagcctgtgaaacaggatctgttatcatcctgttattattattattaccattattttgagacagagtctcactctgtcacccaggctggagttcagtggcatgatcatagctcactgcagccttacacctaaagcaatcctcccaccttaccctcccaagtagctaggactacaggtgcctcctga[132 bp omitted]aacctcgtctctactaaaaatacaaaaattagctgggcatggtggcacgggcctgtagtcccagctactcaggaagctaaggcagaagaatcgcttgaacccaggaggtggaggttgcagtgagccgagattgcgccattgcactccagctgggtcaacaagacggaaactctgtctcaaaaaaaaaaaaatctgtagagacagggtgtccccttgttgcccagactggtcttgaactcctggtttcaagggattcttccttctaccttggcctcccaaagtgctgggactacaggagcacactccatgcccggccccattcgccactattaaagtcacaaggggctgggcatggtggtttatacctgtaatctcagcattttgggaggccaaggcaggtggatcacttgaggtcaggaggttgagaacagcttggccaacatggtgaaacccagtctccactaaacatacaaaaattagccgggcatggtggcggacgcctgtaatcccagctacttgggaagctgaggcaggagaattgcttgaaccagggattggagattgcagtgagccgagatcatggcactgcactccagcctgagcgacagagcgagactccatctcaaaaaataaaaattaaaaaataataaagtcacaaggaaggcacagagagggaaagccacctgcctaaggtcacataactagcacatggacgagccagggctcaaaactatgtctctaagcccagcatgttgaattctattttccccaatgaagcaggtcctgctattgaaaacacaggatatttgatgaggacaataataatatataatgttatattattattattattattattattattattattattataaaactaatagcagctaaattgcatcaagagccttctatacatcagaccccatgggacagagtcatattttcttgatgtgatccactctacagatgaggaagctgaggctccacgaggttaagtaactgcccggaagtcacaaagctaacgatcaggagacag[138 bp omitted]aacacagtgagaccccctgagtctacaaattgttttttttattagccagtcattgcggcacatgcctgtagtcccacctacttgggaggttgaggcaggaggatcatttgagtccaggagttcaaggctacagtgagctatgatctcaccactgcacttcagcctgggagacagagccagatcttgtctcaaaaaaaaagcaggacaagacccagtaattgagccagatgggaacttaggccctgaccagccctactctctcctcttagaaagggaaattgaggcccctgagagcaagaaagctgcctcaagcctacagacttccagatggaatttcgtttccctctcaggactttgagcaggtaaattcctggcctttcctcccccaggatgggttggggaaaaagaaacagcagctggggaggagatctgaacaggtacaaagggcggcctgcatgaggggaaagtggttagacaccaagcagaacttcctggcctcctctgggaagtttctaagactcatccaggggctgcccctgcgggtgggggccctccagaggccaaggcccagagaaaggagaccctagtcctttccgcctggggtgcaaggagccgggggagggtgggggtggccatcctggttccgcatcctccgttcccgacattggagggaggctgctgtgggagctgggactttcctgagagcagaagattctgggaaattagagacagctgcagggcggggctgcctcccagcctcccttcccttccctccccttggtccctgctggctccggaggcacgcctctccacccctccaccccaccagctcctcctcccctagtccatgccttccaccctcggaccctcagatcttttcccctgagcctctttcttctccctcagatctggcctctaccctcagactctctccaaatcttctttcctcagacccttctttcccctccaactctctcctcctccctcagagctgcgtcccctcacttagtgcttctcagacttcctcagactgtgccctctccctcagatactctcccctcccctcagaccctcacctcctcactcagaccctcacttcctccttcagaccctcacctcctccctcagacccttacctcctccttcaaaccctcacctattctctcaaaccctcacctccttcctcagatgcttatctcctccttcagaccctcacctcctccctcagacccccacctcctccttcagagcctcacctcctctcagaccctcacctcctccctccaaacctcacctccaccttcagacccttacctcctcctttagaccctcacctcctctctcaaaccctcacctccttcctcacatgcttatctcctccttcagactctcacctcctccctcagacccccacctccttcagaccctcgtctcctctctcagaccctcacctcctcccttagcccctcatctcctccccccgaacctcacctccaccttcagaccctcacctcctccttcagaccctcacctcctctctcaaaccctcgcctccttcctcagactcttatctcctccttcagacccttgtctcctccctcagaccttcacctcctccctccaaacctcgcctccaccctcagacccttatttcctccatcagacccttacctcctccaacagaccctgtcctcctccttcagatcctctccccctcctcccactaaaccatctacttctctctcagacctatcttccttcttcagatcctcctccttctgacccttttatccctcttccaacctcagagaaccatcagcaccctctcttccagcagcaccgtctctcccagcccttcgaagctcccaccggacccatcacatcttctcccctctacagtcctgctaggttggaaccactgcaccagctgccctgggatgccaggagtgggacaggcttgggtgtccttcccaccctacctctgagggtccccaccctaagcctcgcccctccaaacctcagctttcctttctgtgcattgggatagtgctccacacccctctcctgtgtctgagggtccccaggggtggggttggatgggcagggaacacagcccccagcctgtccaaccgaattcctcccctcttcccttgctgtggcccccacaacaccagcaggcaggggttgccattggtcccattttccagaagaacaaactgagtctcaaggcaggggatggcttgtctgaggtcccaccgggagcaaggggtggaggtggaattaacacaggtctgtgctcgggatgtttcgccatgaagggggataagggagatccagagagaggtcgaaaggaagggaaggggtgaggcctctccacacagccacttctcacatcctgggttaacgatccactcgggtggggcccgagtccggccaaagtcccttcccggggccccaatacccactttcaaggtcccaggggacacagagacagcaacagagatggggagacagagacagagggcggggcaggagacaaccagagggaggtcaggcaagtttcgaagacagaaggagaccgggggagagaaccagagagacgccgcgtgccccctgggcaagtccggggtgcagcccccatgccccgccccctgtgtccccaaagcctccctctccgcctcctgtgactcagtgacccggactcaaccccagcggctgccccgcccccagggaaatccgggaaagccccggaccttcggggccccaccccggggcggggagagggagaggaggggaggagacggggaagagtcccgcctccctcctccctccctcccatctccagcctgagtcatgcccccaacccgcctagcctgttccccacccatcaacccctcctcgaggtgggaggggaagtcggggggaagccaaactgctccccgctcctgcagcaccggcctcggtcgcgctgactctggcctggtgtccgtgtctcttgctatctctctttctctcaagatctctgcgcctgtctccatgtctctttctctctgtgcacctaggattttccgagcacccaccccggtgccccgcgggccccggctgggggcagggcccccaacgagtgcagagacacaatcagtggagcgctccccaccctcaccccacccccagcccctttagacccacagctgatgaggcacgtggagtggcagagatggaagaggggagggagaggaatcgttcctggccgcctgccgagtgccagtccctgccccgggtgcgtctcttcactcccactaaggaggaaacggctcagagaggggaagtgtttggccaaggtcacccagcgagtaagtgggaaccgagattccaaaccccgtcccagagatgccaaggcctcctgagagacagagaagcagacagcaactgagaggcagagagatggtgacagacacaaagagacaaaagagagagacagagacggaacagagcacacagagacaaacgcggggttgcggagagaaacacctactcagacaggagaaccagagagacagttacagactcagagatagagatgttgagagatagggccagaaagacaaaaacagaggcagagagagcggcccttggcagcaggggtggggacacccccccaccccccgaccccgcctcctctccccccacccctcctttcctctccctcccccgccgaggcctggctgccccaggcgccgcgggccgggagggggcaagcggggcgcggcgcgggcggggcgcagggcaggctgcacctcagagcggcgggagcagcggcgggtccaggaaacccctggggcgtacgggtggccccgggggggccgggggcggggaggcgggcggccggcaccgccccggccgacaaaagtcccttcagttcagccggctgcaggggaagtcccggcgcccggcgaaaccaccctcccgtgcagccgagcccagccgctctccggccgccgtccccggcggccccatgccccgatgccccgcgggggccatggacgaggggcccgtggacctgcgcacccggcccaaggccgccggactcccgggcgccgcgctgccgctccgcaagcgcccgctgcgcgcgccctccccggagcccgccgctccccgcggcgctgcgggccttgtcgtccccctggaccctctgcgcggcggctgcgacctgccggcggtccccgggcccccccacggcctggcccggccggaggcgctttactaccccggtgagtggcccccgagggtccgggccgggtgggatccacacagagcatagggtcaccagagccaggaggcagagcttgaggcacaaaccggtgtctctccagggacctgggggacaagaggatataagcccaggttccaaggatatagatatgagatcatcggggagccagtaagctgtgccttgggatctggggatttggggaccctggggggcaaagcccaggggctgagtgacgtgggggggggggggccagggacaatgcccagtggtacaaatatgggggtgtcagggaatcagggcacagagcctggtatcctaggggcaagaaagtacaagctcttaagccagatgtgtagcgttatgaggaagctgagctgggctggagaaactggggttccctgtatcctgatattattagaatcaaagggagtcagggtaacagagactggggttctaaggagacagatactgaggatctcaggatgtcacaatctcaggaaccaagatatctggagacatgggcattatgaaaacagagatggggttctgagcaccccaatatctgggatcacaaggatccaaggaaatgaaccagagctccagggacccagataccagggggtcttgaggacccaggagaacagagacccgggtttctgggtactcagttatgtggggccacaagtgatcagggtcctatttgaggtcaagatcaggtgggcagaagggatcaggggactgaggatcctaagattgggtaattctgagactttgggtaatttagaggcaggatgaaaatttcaggggtctccagacagaaagcctcaaggcctcaaggcctggtattggagatacgaggacctggaaacttgggagttcaagaacagagggcccacaaggatcagcagatgacgaagaccacacactcttctctccatcctatctccatccctgatctcaagaaggggtgtcctctaccacagctgtggccacgtcaccatccccaattgacccccaaagctgcagagagccgttctacagagccccaaaactttaggtagtttctgcaccctccaccccatcagcgtgacagctggagagcctcaagctatgtgcatcaggagttctgccacggcctcccagctttcctattccaagagtgagaaagcaggcctcagttttccccgtctgtgtgatgggttggtatggatttgcctgctgccatggtcccctcgcctttgtttgtttttgtttttgttttttgagacagagttttgttttgctctgtcgcccaggctggagtgcattggcgtgatctcggctcactgcaacctccgcctcccaagttcaggggattcttgtgcctcagcctcccgagtagctgggattacaggcatgcaccaccacacctggctaatttttgtatttttagtagagacagggtttcaccatgttgcccagactggtattgaactcctgacctcaggtgatccgcccgcctcggcctcccaaagtattggtattagaggcatgagccacagcgcccggcctgccgtggcccctttttaaacagtttgatctaaaattacccatgcgtggtggtcagcatctgtaatcccagctacctgggaggttgaggcaggagaatcgcttgaacctgggaggcagaggttgcagtggggcaagatcgtgccactgcactccagtctgggcaacagagcgagactacatctcaaaaacaatttgaacaggcttctggtaacacctcctctctgcctccactctccccaaacccactctacatttatcccacaccctgcacccagcaattcatcagccacaaaatcactctgcagacagtccctggggtcccctgctaggtgatgatgggtgcaccctctgttcttaagggaccctttgtctgattggagattgaggtcagaagataagtgacaatgagggtgaccagccctagagggagaggaagctgccagagcccagaggagggacgtggaagggggtttgttttaggccctgaggaccctgtatgggatgcaaaagggacccaggagaaagggcaggtgacaccacaggagcaaagttttagaagtggggggcgggttgagggtctgtgggtgtggcctcacccatgtcccttctctgtcctccattgtccaggagccttactgcctttgtaccccactcgggccatgggctccccgtttcctctggtgaacctgcctacacccctataccccatgatgtgccccatggaacaccccctttctgctgacatcgccatggccacccgtgcagatgaggacggagacacgtgagtgacagtcccctattaaggggaggggtggttgggaagaccagccgtccataacacagggccactcagctcccagtggacctgagtcagaactcggtctccaccacaggctgtgtgaccttgagtaaggcccttccctgctctgagcctcagtttcctcctctgaagaatgggcaccttgagagcatttacctcctaggccactatttttgtttggtttttgtttttgtttttttgagacagggtctcactctgtcgcccaggctggagtgcagtggcacgatctcagctcactgcaacctctgccccccaagttcaagtgagtctcatgccacagcctcccgagtagctgagactacaggtgcccactgccaagcctggctaatttttgtattttttggtagagacagggtttcaccatgttggccaggttggtctcaaactcctgacctcaagtgatccactcgccttggcctcccaaagtgctgggattacaggcatgagccccaagcccacccctagaacactatttttggaacggtggtctttagatattttgtcacaacctaaaaacaagaaagacagttcattgattaacttactatatgaattatacatgtaaaactatcactggacctggcataaatgttgagtaagtgtttgttaatattactattattttatctcaaacccagcacacacacacacacacacacacacacacacaaacttgaaattaaaattgcacaaaatgaaacaatactcgcccttactatgtgggttctactgtgacattttctttttttctttttttctttttcttttttttttttctgagacagggtctcgatctgtcacccaggctggagtgcagtggtgcaatcatagctcactgcagccttgatctcttgggctcaaatgatcctcccacctcagcctcctgagtagctgggaccacagacgctacccccacacctggctaatttttgtattttttttttgtagaaacacagcagtcttgctatgttgcccagactggtctcaaactcctgggcttaagtgatcctcccacctcagcctcccaaagtgctgagattacagatgtgagccaccgagcccagcttacagctttactttgccattttctattctagtcgacttcattgtttcatggtcacagcccactacattaatttgaagatcccctaaattgatttcacaacccccatggtttatcacctgcagtctgaagaacatgtttgtgaggctgctgagaagtcctgcacgggagggtttggtctgtgcctagcacatagtaagcactcactgcaattgatcatcatgattcttattattctattgacctgggttggaatctcagcgtggccacgttctactccctctgtgcctcagtttccctctctgtaaaaacaggaaccatcgcgtgtgagggtctctgggaggaagaaatgacatgatttatacaaagcacttctgtgagaattagtttggggcctggaaaccacaggtagagatgaacaggcctgtttctgcagagaagtagcagagggctgctccgccactggcccactgagtgatttcatgtccctgagtctcagtttccctatttggaaactgggtctcataatagcacctatcacaattaggattcagtgagatcttgtacacatgtattaatacagtgcacagaacagggctgggcaaacagtaagtgctcaatgcatggaaatgggtaatgtttgagcagagctcccagggtggttgcaggccatctccagagccctagcaggagaaagtggcctagattataaagagctaataaaacctagttccctccccttctgggtacctctggggggtcatctatgaaatgggcttaatcagacagtctctgcccccagtggtgagctgtccatgctgttgaaaagcagggtgcttgccagaggccacccggcccaccagtctccagccccaggccctccccacaccctccctctccgactctcccccaaggcaaacacttctgcctcagctgcctgctgggggaaatcccttcccgcagaacttgaccgcaacccagctgctctgcctcccccacgtcagcacccgtcactcactcgcagcctcccccctcctggcgcttcctccaaccttaaccccttccgctggggctgagactttaccggaacgggcagcggcccggccccagcctgcgccaccggctcctcttcacacccgcgggggagggcagtgggggcgaggagggcgggggacgctaagtctgggtccccgcagaagccaaaaggttgggaggctgggcttccatctcctcacaggcgggtacgagccttggggcatttggacccccaagaggttagggactgggcagccagaaacctggggagggggcaggaaggcgggggcggggggggggggtgatgttctgattctcagaaggcagaagttggggaactgtattccttaatctccgaggggatgaggagcagcttggcagcttggggacctggcactcagaggggctttacgggcaggaccagatacagaaatttgcagagtcccttgttcaaaacttaagaatttcacgacagcggcagcaggacgttgggctggtgaaactggtcacgccaaggggcctgaaagtctgtgttcccaaagggccagggtttgaggcgctgtatttctgggtctctgaggggacaaggactggcaaggtagtttgggatcctggagctctgaaggacgggggaagtccttattcttaaagaagagttagggctatttctggctcccaagagatgttgggggtggatgccgggataaggaggacttgcagccagctggagcctgagctctgcggggtggagttccagagggtcccccaggcgggaggactcgggattatgcgccccccctacacacacacacctcaagggagctaggtcttcttgggctgggcactcccttcccccgccccattcgaggatggaagttggggtgccaggggtggccagggtagatccccggcgggacaggcttccctcccccgggagcaggaagcagagccccgcccagcagacctgttactggaagtccgagggctgggtcgcccctcccgtccccacttcctccagccccgccccaccccctgcggcccgcgcgtttatgggaactcaggcctggacggtttctctgaaatcattcgctgcgtctgccctcacttaaccctggccgccccgagagggacccaggccaggcgtcctgggagatgcagagaaggggggacccttcccagggaccccggcccctccctcaacattttatttttaaatttggctttcacggattaggagtcaggttcagcgattcacctgcgtgatctcaccctggcatgtggacgctgtactttacataagagaaaactgaggctccgaaaggcccccatggctttgccctagcacgcggctacgctaggaggggttgtggcccaatttgcaactctggccccgggatttctgcactccatcagaaccacctgggaggctagtttaaactggattctagagacacattccacaagagaaacgggtgctggtgagaaaggaattacttagtaaactttaaataaagatcctgccacccactgtgtacacgcagtcctccttgggtcctccactctgtcccccaccccatgcaaacagcacaggcgtgcacaagcacgcacgcatgcacacacaccagtctctgaatagctgttctaggttggggtctctggaaactgagcaggaagtttattggaaatgctctccatcaacacctgtgggatgaaggaagcccatctgggcagagggagaagttgagctgctgtgtcgcctccacacggcctcagctgtcccacagggaatattgaagctggaatggccttcagcattggggtcaggaggctaggccttctatgctggcattaaccagtgactggatgccattgaagggcagctgcccttgattcacatggggcgtgaccttggacaagcagctctcttgagttgagggtaattcccaaatggtctgaaagctgacaatcttcccagaagctgagggagtgagtccttcagtctagaagggggttctggactgtaccgcctccagaacaatggccccatccca[137 bp omitted]ggccaacatggtgaaaccatgtctctactaaaaatacaaaagttagctgggcgcgatggcacacatctgtaatcccagctactcaggaggctgaggttggatgatcgcttgaacctgggaggcagagattgcagtgagcacaagatagcaccactgcactccagcctgggcgatagaacaacactccgtctcaaacaaataaaataaaataaaataaaagggtccctctggctgttgtgtgggggacagacagtagagcataggtggaagcagagaagccatgaggatggaactgtactagaccagcagggagccagtggtggctaaagcaggatggagggagcgggtggtaaatcaggatggagggagtgggtggggagaagtgtttgaatactggggacatttccaaagtattcaacacattggagttagcattgccaacagcatgagggtgagaggtgaacaacccctaatgcctgtgattccttcactcccccacccccaggcctctccatattgctgtggtgcagggtaacctgccagctgtgcaccggctggtcaacctcttccagcaggggggccgggagctcgacatctacaacaacctacggcaggtgaggctcggtctgagggaggagggctggggcctggactcctgggtctgacagaggaggggctgggggcctgaactcctgggtctgagggaggggggctggggcctggacccctgggtctgagggaggagggactggtgcctggactcctgggtctgatggaggagggctgcgggcctgggatccggggtctgatggaggagggctgggtcctgggctcctgagtctgagggaggagggctggggatctggactcctgggtctgagggaggagggctgggggtctggactcctgggtctgagggaggagggctggggtctggactctaagtagcgaggtgctccaggctcctggttcctggggaagaagggctctggggcctcggactggttgttcctgagagggagggggcctaaagacctcctagtgaggagggagggggctggggacccagaattcaggtactagggaaagaggaggttggaggcccagtcttctgggtcctggggaaggaggagcatggggcccggactcttgaatctgagacaggaggtgtctcaggtttctgttcctggggaagactgcaggatgaggaataagggttcagaaaacctgggggaggcaggactagagagcagggctggacacaggtccctcacagtcactgttccccagacaccgctccacctggctgtgatcaccacattaccgtctgtggtccggctcctggtgacagctggtgccagccccatggcgctggaccgccatggccagacggccgctcacctggcgtgcgagcaccgcagcccgacctgcctgcgagccctgctggacagcgcagctccgggcacgttggacctggaggcccgcaattatgacggtaagcatttaccgcggggcaccgctgggctgtccagcggacctggagtccatcagcggccgcaaagcccgggcctaggtttcaccgagccctcctctccctcagggctcaccgccctgcacgtggcagtgaacaccgagtgccaagaaaccgtgcagctcttgctagagcgcggtgccgacatcgacgcagtggtgagcgtgcactaggagctgggagggagcggggccttagcaggggcggggtcttggcgggggcggggccagtgtggggctggcgtgggagagcacccgggtggggtggggcttggagtatcagacccaagagagaggctggaccccgcgaatgggatgtggacgggatgcgggtcgccggctgctggagcagagcttggagaaactaagaccttccctccccgccgcaggacattaagagcggccgctccccgctcatccacgccgtggaaaacaacagccttagcatggtgcagctgctgctgcaggtgcgtacagcccccctgagcctcgcgcccaccctatcctctgaccccaacccggctctggcctcagcccctagctctgaccccgccttccacttctggctccggctcctgctccgcgtccagctctgatcctttaaggcctagttttctcgaccctcgggctccacgcccctggctacgaacttgtcccattcctcctctgccacctcaacggcctaggccccgccctgcgatggcctggctgaccccgccttccagctaggccctgtccacgcattgtccttcccccctccagctcccccgactccttggggcgcgggcctcggtgtccagctccggttaattcatcgccgccaacgcagtcccgcttggcctgcccttggctctcgctcctaccttcctgtgaccccaccccgatccggtgccgccccacgtgccggccacccacccgggcctccagcctctgttcccttaccccgggtggcccgcgcgccctcctgacccggccctcccgtcccgcagcacggcgccaacgtgaacgcgcaaatgtactccggcagctccgccctgcactcagcgtccggccgcgggctcctcccgctggtgcgcacgctggtccgcagcggcgctgacagcagcctcaagaactgccacaacgacacgccgctcatggtggcgcgcagccgcagggtgagccggggcagctgtggacatgccccttgcacacgtgtgtccgcgggctggttgcaggcgagtgtgccagagcgcagaggagtgagggtgtctgtgccgttgcgtggaggggagtgggtgagcctctgaaagcgcgggtgtgagttccagaaatgaggagagactggcaccaagaaaaaaagtgccttgcccatcttttcatactgagaagtggagaggccaccacctggatccagtgagctaggagggatgggagagaggactgtgaggcatgggtggctctatggtcacgcccatcttcctacaggtcatcgacatcctgagggggaaggccacccggcctgcttccacctcccagccagacccctcccctgaccggagcgccaacacctcccccgagagcagcagccgcctcagctccaatggtgagaaaccgttcccaacctccagccctggcgcctcctccctcagacccaggaatcccaacccacagcccctcctccctcagatccaggagtccaggcccctagcctcctccctctgacccaggaatcccaacccatagcccctcctccctcagacccctggcccctcctccctcagaccccagcccctcctccttcagaccccccagcccctcctccctcagacctcagcccctcctccctcatacccccagcccctcttatctcaaacctcagcccctcctccctcagacccaggagtccagatttccagaccctcctccctcagacctcagcccctcctccctcacacccccagcccctcctccttctgacccccggcccctcttccttcagacccaggagtctaggtccccagatgcctctttcctcagacccgggagtttaaatccccagcccctcctccctcagacccgagtccagacccccagcccctcctccctcagacccagatctcaggccccagcccctgctctctgggtctagcctctcaccacccacccctctgtctctcttccttcctcaggtcttctctccgcatcaccatcctcctcaccctcccagtctccccccagggacccccctggattccccatggctcctcccaatttcttccttccttccccatctccacccgccttcctgccctttgctggggtcctccgaggccctggccggccggtgcccccctccccagctccaggaggcagctgagggggatgggggggcagatcttggactcatgaggaggggcccccctgccctgtggggtcaacccttctggaaactgtgaagatctcactctgccccccccccccatcttcgggaccaggatttgcacagaagcacatgcacctacccatacaccccctcttctgagcacagatgttcccccatctcgctccctcccaggactctgaccccagcattctcaggcaccagtccctgtccggaatgccacccacatcttccatttccatgtcccctcccagagctggtggacccagggaacagccactcccctccactctctaccagataactgaggaggggagaggtgggccgtaacgggcacggatcacgatgtaaattattaagcattttggttggatttcttttgtaataaactatttttgtaccatatcccttgggtgcatgggcctctttcatgagatggacctggcggaagtgccttcgtgtgtgtgcacacccgtgcactgaatccagttgactcccagagtgatgttgtgagtctcagacagacaatctcctgtgtgtcactctgggacttctggtgtgtttggttgtgaatgttgccatcattgtcactgtaccattgtttctaaggaggacgtggtgtgtgatatcttttttttttttttttcaagacagagtcttgctctgtcgcccaagctggagtgcagtggcacgatctcggctcactgcaacctccgcctccccggttcaagcgattctcctgcctcagcctcccgagtagctgggattacaggtgtgcaccaccacacctggctaatttttgtaattttagtagagacggggtttcaccatgttggtcaggctggtcttgaactcctgacctcatgatcctcctgtgtcggcctcccaaagtgctgggattacaggcatgagccactgcacctggccggtgtgtgatatctttccagggcaccctgttggattccgtagtgaccctgggcatgtgtgtttctgtagtgtgggggtcctggtgataacccacagctgacttcagccccaatcgtctctggctgtccgagtgcgtggtgcttgggagtgttcctaacattgagatctggggtgatgctgtgattgttgccctgtgactgcctcacatggcgtgagacagttttacttagtggttccatggggcccctctaatggaccacatctgtggttttgttgttgtttttttggggggggatggagtctcactctgtcacccaggctggagtgcaatggcgtgatctcggctcactgcaacctccgcctcctgggttcaagagattctcctgccccagcctccagagtagctgggattacaggcacccaccaccatgcctggctaatttttgtatttttagtagagagggggttttgccacattggccaggctggtctcaaactcctgacctcaggcgatctgcctgctttggcctcccaaagtgctgggattacaagcgtgagtcaccgcgcccagccacacatctgtgctttgactctggggtatgcctctgtgtgtcagtcggggtttgtaatggtttcctgttgccactataacaaatcacaaattcagtggcttgaaatgatgctaacttttttttttttttttttaaaacagagtttcactctgtcacccaggctggagtgcagtggcacaatctcagctcactacaacctccacttccctggttcaagccattctcctacctcagcctcccaagtagctgggactacaggcgtgcaccaccacacccggttaattttttgtatttttactagtcacagggttttgacatgttggccagactgatctggaactcctgacctcaagtgatccacccacctcagcctcccaaagtgctgggattacaaaaggtgtgagccaccgtgccagccaaacaatact[187 bp omitted]gtggcgggcacctgtagtcccagctactcgggaggctgaggcaggggaatggtgtgaacccgggaggcagagcttgcagagagccgagatcgcaccactgcactccaacctgggtgacagagtgagactccgtctcaaaaaaaaaaaaaaaaaaaaagaagtccaaaattgaggccaagcctggtggctcacacctgtaatcccagcactttgggaggctgaggcaggagaatcccctgagaccagaagtttgagaccagcccgagcagtatagtgagaccctgtctgtacaaaaaaaaaaaaaaaaaaaaaattagctgggcatggtggcaggcacctgtagtcccagctactcggaagactgaggtgggaggattgcttgagtctgtgagttcgaggctgcagtgagctatgatcgcaccacagcactccagcctgggcaacaggtgaggccctgcctcaaaaaaataaataaaagaaccatggtgtcagcatctgcttcttgtggtgaaggcttcaggctgcttctactcatggcagaaggccgagggaaccacacgtgtgtggggatcaagtggcaggaggggaagcgagagagagacagagagagagaagtgccagcctccctttaacacccatctctcatgggcgtcaatggggagaactcattcacccgccagggaggacattaatctattcatgagggacctgcccccatggcccaaacacacctcacatcaggcccacctccaaccttgggaatcaaagttctttttttttttttgagacagagtctcactctgtcgcccaggctgcagtgcagaggcccaatctcggctcactgcagcctttgcctccaaggttcaagcgattctccagcctc[212 bp omitted]tctcactctatcacccaggctggggtgcagcaggagatcctagctcactgcaacctcgacctgggttcaagtgaggggatcagatttcaacatgaggttttgaaggaaaaaatattcaaaccatagcactgagtgttttttgttttttatggggttttttggtttgtttgtttgtttaatctgtgggggcttctctgggtcgtcatgtgaattgctgatagtgaacatttaatccccatcactctgtaatgtagttgcatctgtggggccagctgccttaacaacttcctggatggcatcactggggtctgtgaagggctgtgtgtgtgcacacaaacactcatgcacacgcacttctggatggcctgtgtgagcactgactgggtgacctgtgtgtgcctggcccgcctgactgggacgtccatgcgtctttctgtttgcaactatgtttcagtgtttctgacccagaccctgtgctctggtatctctgaagctgccag[136 bp omitted]atcccgtctctgctaaaaatacaaaaattagccaggtgtggtggtgtgcacctgtaatcccagctactcaggaggctgaggcaggagaatagcttgaacccaggaggcaggggttgcagtgagccaagatcacgtcactgcactccagcctgggagacaaagcgagagtccgtctcaaaaaaataaaaaataagaaataaaaaatcctgttgctgccatgcaaactgccacaaactaggtggcttaacacaacagaaatgtattcctttacagttctgaagtccggaagtccaaaatcaaggcgtcggcaggaccgcactcaccaaaaactgtaggggagactccttccttgcctcttccagcttctggtagccccaagcattcctccgcttctggctgcatcagtccagtctctgcctctgtcttcacatgatcttctcctttgtgtgtccatgtcttcttctctgtctcttatgaggacatttgtcactgagcacagtggctcacacttgcaattccagcactttggggaaggcaaggtgggaggatcacttgaggccaggagttcaagaccagcccagacaacatagcaacaccctgtcttgaagggaagggaaggggaggggaagggaggaaagagggagaggaaggaaggaaggaaggaaggaaggaaggaaggaaggaagcaagcgagggagggagggagggagagattatttctatgtttcctggtcaacatagtgagacgctgtctctacagaagatcaaaaaatgtgttggctgagcatgagcctggtggtgtgtgcctgcagtcccagctacttaggaggctgaggttcaagcatcactttagcccgggatgtcaaggctgcagtgaactatgatcacgccactgcattccagcctgggtgccagagggagatcctgtctcttgttttgttttgttttgttttgttttgttttgttttgttgttactaagtctcactctgctgcacaggctggaggagtgcagtggtgcaatctctgctcactgcaatctccgtctcccaggttcaagcaattctcctgcctcagcctcccaagtagctggaattacaggcatgcatcatc[132 bp omitted]ctcctgcctcagcctcccgagtagctgggactacaggcacccgccaccacatccagttaattttttgtatttttagtagagacagggtttcaccatgttggtcaggctggtctcaaactcccgaccccaggagatcctcctggctcagcctcccagagtgctgggattacaggcatgagccaccgcacccagccaatatttatgtttaatccttagagcaacttgcaggtttgctccaaggtttaaacatgaacactagtcaagctaattgtgctcctctcctcctatgcagtggcggcaaacagcagtgccctcagtagtatacgcagcctgctgcgtgtagcggtggccttaagagaccttggagatagccctttccgatgcatgttcatgtttctgatcttgacctcaccccagtctagactccagacaggtatgcgaggcgcctttggaaagccccagggtgtggtggccagggttcacattggctaaggcatcacgtccatccgcaccaagctgcagaacatggaacacgtgattgaggccctacccagggccaagttcaagctccctggccaccagaagacccacatctcaaggcggtgggactttaccaagtttagtgcagatgaatgtgaagacacggtggctgagaagtagctcatcctggatggctgtggcatcagatacatccccaatcataggcccctggaatagtggcgagccctgcttactcacacccaccaataaatcctccttcctgtccaaaccgaaaaaaaaaaaatatgaacgggacacagtggctcacgcctgtaatcctagcactttgggagctggaggtgggcagatcgattgagcccaggagttcaagacaagcctgggcaatatggtgaaaccctgtctctccaaaaaaaaaacaaaaattagccggtatggtggtgcacgcctgtagtcccacccactggggaggccgaggtggcaggatcacttgagcctaagaggtcaaggccgcagtgaatcaagattgcgccactgcattccagcctgggtgacagagagagaccttgtctcaaaaaaggaaaaaggtggggggaagtaaattttgtgcaatacttattacaggccatggtgctgagtaagagcttcataaatgggaattgctgttgccatcatctaagaatttttgacagttttgaggtcagaggaaacacagtagagacgatgagacctattctttgtcctggtagaaaaatggaacaatgaggtcatagcctagatgtgtgttttagctacattttttttattccacggttgtaattaaattaaataatatagctgggcatggtggcacacacctgtagtcatagctactcgggagggaggctgaggcatgaggatcacttgagcccaggagtttgagaccagcctgggcaatgtagtgagaccccatctcttgaaagagtgaagtgactcgcatctgtaattccagcacttttggaggccaaggcaggagaattgcttgagcccaggagtttgagatcagcctgggccacatagcaagatcctctctctacaataaaaaaaaaaaaattatattaggtgcctgtggtcctagctattcaaaggctgaggcagggtgcagtggctcacgcctgtaatcccagaagtttgggaggc[134 bp omitted]aggctgaggcgggagaatggggtgaacctgggaggcggagcttgcggtgagctgagatcgcaccactgcactccagcctgggtgacagaggagactccatctcaaaaaaaaaaaaaaaaaaggccgagaggagtttgaagctgcaatgagctatgattgcaccactgcactccagcctagacaacagagagagaccctatctttaaaaaatatataaaacaaagagcctgagtaacatggcaaaagcctgggtaacatggcgaaaccctatctctacaaaaaaaaacgcaaaaattaaccaggcatggtagcgtgcatctgtagtcccagctactcaggaggctgaggtaggaggaccacttgacaccgagaggtcagggctacagtgacctatgactgcaccactatgctccagcctgggtgacagagtgagaccctgtctttaaaaatataataaataaaagaagaaatatagtagcttttttttttttgagacagagtcttgctctgtcacccaggttggagtgcagtggcaaaatctcagttcactgcaacctctgcctcccaggttcaagcgattctcctgcctcagcctcccgagtagctgggattacaggagcctgccaccacgcccggctaatttttgtatttttagtagtgatggagtttcgccatgttggtcaggctggtcttgaactcccgacctcaggtgatcacccaccttggcctcccaaagtgctgggattacaggcatgagctaccacgtccacccaatagtagcttaaataagatgaaagtctatttttctctcatgtaaaggcccagcgaacacccgcatctagaatagtagccaaggatgtcagagatcgaggctccttctacctggttgttctgctgccctcacctcacacttccattgtgtggtccaaaatggctgctccagctcccaccatcacatccacattccaaccactgggaagaagaaacaaaagtcaatcgcatgcccctacctttaaagctacaacccagaagtcatacacatcatacacatcacatcctatttggccagaatttagtcacatgaccacacctatcacaacagaggctgggaaatgtggttttatctgggcagcatgtacccagccaaaattcaggggttctgctacaaaaggaagaggagagaatggttattgaggggccgcacatgtatctgtcacaaccagggctctgccaccaaatgactaaatgactcaaggtgaagtgacttcaccacactgagcctcagtttcctcacctgtaagaagggaatccccccgaccccttggggttgatgggttgttgggcatttaatgagagtgtgagtgtcaggcacttagcccaggacctggcccatcatcagtctggagtgtgttggaagtcctcttgtgcttgtgggtctaggctgtgggtgatgtggcttttcgtgtatgagaaaccgtcccggggcttgagagctgaacccagcactgaactttataagtaacttctctaaaacaagggatctggcctctgtacacatggaaatccccactcagcctcctagaccttgggactaggcacatgtccttccacagtcttcccccttccgctggagaaaggcagactccaaagatggaggaagggtcctgcttggggtctccagcctcccagccttcacagaattaagcactcatagcctggccaacatggtgaaaccccgtctgttctaaaaatacaaaaatgtgctggatatggtggcacacatctgtagtcccagctactagggagactgaagtgggaggattgcttgaacctgggagggggaggttgcagtgagccaagatcgtgccactgcactccagcctgggtgacagaaaaataataataataattcaatcactcacccctcaacttccaaagctcctcatgggtgacagtcccagcattccggggacagctctaacgccagaagtcataccttcaatgcatttctcggggctccactcgcttgtcctcaccacattgagtaaacccagaaagacagaggacatctctcctagatgcgtgtgtgaaatctgccagattctaaatgcctgggacattccaaaaagtgactttaagagcattggccgggcacagtggctcacacctgtaatcccaaccctttgggaggctgaggtgggaggacagactgagccctggagttcaagaccatcctgggcaacatgggtagaccccggctctaaccccgaacatggtggcacgtgcctgcagtcccagatactcagaaggctgaggtgggaggatcgcttaagcccaggaggttgaggctgcagtgagctgtgaccatgccactgcactccagcctgagtgacagcgagagactttgcctcaaacacacacacacagagtcaggggacggtggcttacacctgtaatcccagcactttgggaggccaaggtgagtggattggccaggagttcaagaccagcctgggcaacatggcaaaatcccatctctacaaaaattagccaggtatggtggcacccaccaacttgagaggctgaggtagaaggattgcttgaacccagaggcagaggttgcagtgagctgtgattcagccactgcactccagcctgggcgacagagggagactgtctcaaaaaacaaaaagaaaaaaaaagagtgtgagaggta[138 bp omitted]gcctcagcctcccaagtagctgggactacaggcgcccgccaccacgcccggataattttttatatttttagtagagatggg[131 bp omitted]tcagaccttcacataagccagacttttactttatagaaagggaaactgtggcccagggatggaagagactgacttggtgaatcgataggtctgggattccatgattcaccataaccaaccgaccaaatctgtcagcattcttgggacaaccagcatcgtgtgcctcctgatatcatgtacagagaaggacacagcatcacttctgtaacactcctgccaccagaatctaatcacaaggaaacatcacacaaacccaaatcaaggagaccttctccaaaagaactagcctataatcttcaaaaatgtcaattccatgaaaaacaaagaaaggccaaggaaccgtaccagactgaaggaaaccgaagagatgaaaactttttgctatgacagatagtttggggacagctggcaatttgcatacaggctgcactgttggatactactgtcactgagaaatgtacactgctcctctgtactgtggtggtgtaagagaacgtccttacacttggaaatgcaactgaagcatttagaggcaaagggacgtaatgtctgaaactattcttgcaacttctctgtaactttaaaataatttcaaaagaaaaacaaatgatttcaaag[137 bp omitted]actccgtctctactaaaaatacaaaaaattagccaggtgtggtgagatgcgcctgtaataccagctactcgggagcgtgaggcacga[134 bp omitted]gtgtttccgagtatctctaagtctgtgcatgcatttgtggtcagagtctggggagctgggggcgtgaatgggctgcttcagacactgctttgagggtgtgaccaggacctgagggtgtggttaaggtgtaggggtggggctaggcccttgggggtgggaccacagtcccagaggcgtggccagggcctcgaaggtatggccatagtttgaggcgtggccgagaaactccgttcccaagggaggtggtaactctgtgctcagagcgccctcttgtggctatcctcaggtctccactttttattcaatagctttatttcgttttatttttttcaactttcattttagattcagggagtacatgtgcaggcttgttacctgggtatattgcatgatgctgaggtttggggtacgactgatcccgtcacccaggtactgagcatagtacccaacagtttttcaacccttgccccctcccttcttccctccccactttagcagtccccagtttctattgttgccatctttatgtccctgagtactcaacgtttagctcccacttacaagtaagaatgagcggtatttggctttttcatccagcctaactgttttattgagatataatgtgtataccatacaatttacctctttaaagtgtacaattctggccgggcgcagtggctcatgcctgtaatcccaccactttgggaggccgaggtgggagaattacttgaactcaggagttcaagaccagcctgggcaacacagagagacctcgtctctataaaaataaaaataaaattttaaaaagtgtacaattcagtgactttagtatattcacaaaatagtgcaattatcaccagacttttttttttttttttttttttgagatggagtctagctctgtcgcccaggctggagtgcaatggttcagtctcagctcactgcaacctctgcctcccaggttcatgccattctcctgtctcagcctcccgagtagctaggattacaggtgcatgccgccatgcccggctaattttttatactttagtagagacagggtttcactgtgttg[134 bp omitted]aaacctcatacccattagtagtcactccctatttcccctcaacacccttccagctctagacaacccataacatactctcccttttttgtatttttggacataacatagttgtacatattgtgggggtacatgtgatgttttgatacatgtatacaatgtgcaatgatgaaatcagggtaactgggatatccatcacctcgtttatcttttctttgtgtttagaacatcacaattattctct[132 bp omitted]cctccagactagctgggactacaggcgcccgccaccaggcccggctaattttttgtatatttagtagagacgtgggtaacacggtaagacgtagtaacacggggtttcaccg[133 bp omitted]gctctgtcacccaagttggagtgcaacggcactatctcagctcactgaaacctccacctcccgggatcaagagattctcctgccttagcctcccgagtagctgggattacaggcgcatctcactgcggctggctaatttttgttttttagtagagagggggttttaccatgttgcccaggctggtctcgaactcctgacctcaggtgatctgcctgccctggcctcccaaagtgctgggattacagctgtgatctgcccaggctggccagtgactggcttctttcacttagcattatgttttttttgagatacttcattcctattagcagggagtgacatgcacctgtggtcccagctactcaggaggctgaggcaggaggattgcttgagcccggaagatcgaagatgcagtgagctgagattgtgccactgcgctccactctgggagacagcacaagaccctatctcaaaacaaacaaacaaacaaaaaatcattccttttaatggccaaagaattttccgttgtatgagcagaccacattttgattatccattcttcaactgatggacatttaggttgtttccacaagtctttgggtagatatatgcttccaattctctgggatatatatatacgtaggaatgctctagccctgtgtttaacattttggggagctgccaaactgttttccaaagcagctgcaccattttacattcccaccaacagcgtagagggttccaattatttctccatatccttgccaacacttgtgattgtctgtcttgtttatgacagtcatcgtagtgggtgtgaagcagcattcactgtggttttgatgttcatttccttagtggatcacattgtggagcatcttttcatgtcattcacttcatttgtatccactttgagtcaaatctggaaaaagagttattatagttgcaaagtggatacaaaaaaacctgtcaaatctaggaaaagagttcatatagttgcagattttttttcttttttagacaagatctcactgggtcatccaggctggagtacagcaacacaatcatagctcactgaagcctcaaactcctgggctccagcaatcctcccacctcagcctcccgagtagctgggaccacaggcagcatcccagcatgcccagtttttttttgttgttgttgttctttgtttttgtctttttcagacggagtctcgcgctgtcgcccaggctggagtgcagtggcatgatcttggctcactgcagcctccgactcctgggttcaagcgattctcctgcctcagcttcctgagtagctacgattacaggtgcgtgccaccatacccagctaagttttgtatttttcatagagatggggtttcaccatgttggtcaggctggtctcgaactcctgagctcatgatccgcctgccttggcctcccaaagtgctgggattacatgcgtgagccactgcacccaaccatttttggttttttggttttgctttgttttgtttttgtttttgtttgtagagacagggccttgctatgttgccaggttggtctcaaactcctggcttcaaccgatcctcccacatcagcctcccaaagtgacaggattacaggcgtgagcaccacccctcttccagcttgtggtgttcactggtaatctttggtgttgtttggcttatagatgcatcactccaatctctctgccgccatcgtcatatgttgtgtgtgtgtgtgtgtgtgtgtgtgtgtgtgtgtgcacctgtaactgtatccaaatttccttttcataaggatatcagtcagatttaggacccaccctaatccagtagaaacttatcctgatctgattacatttgcaaagaccttatttccatatagggtcacattcataaattccagtgaacatgaacttggtggggaggggaatgattcaacccaggccactcattattatgtgtttatgacacacactgttggtatttgtgtccagttcattcaccttaattgctgcgcaagagtttattgtgagagtacaccacaatttatgtcaggctgctggtggtgaacacccaccttgttgccaatttcctccacttccaacaagaatgcaattaacatccctgaacatgtctcttggagtttcttagggcagtatctttcaaacggccaaacaagatccattagtgggttgtgaaatcaatttagtgggttataaacaatttttcctttaatgaaatggaattaaatagaagctattagagtgcatgctcatagtcggagtgagagctcttctgtgaaacttttgcttcaggtgtctatagctgtattaatgtccagcaaaagtgtttacaagccacagctctgaaagaggtaactggacaaatgacctgtccatttgtccaaaggtctcgtggatgctgccaaattgctctgcaatgtagtttgtccatttgcactcagagcagctccttgccaatacttgccagtcaacactttgaactttttcaggctaatgggttttcatcctgttttgttttttgttttgttttgttttgttttgttttgttttttgagacagtctcgctctgtcgcccaggctgtagtgcagcagcatgatctcagctcactgcaacctcttccccccgccgggttcaagcgattctcctacctctgcctcacaagtaactgggattacaggcacaccactatgcccagctaatttttgtattattttaattatttatttatttatttttatttatttatttttgagatggagtctcactctgtcacccaggctggagtgcagtgctgcagtgttggctcactgcaacctctgcctcctggattcaagcgattctcccgcctcagcctcctgagtagctgggactgcaggcacgcaacaccatgcccagctaatttttgtattttgagaaagggggttttgccatgttggccaggctagtctccaacttctaacctcaagtgatccacccacctcagcctccaaaagtgctgggattacaggcatgagcaactgtgcccagcctaatttttgtatttttagcagagatagggtttcaccatgttggccaggctggtctcaaactcctgaactcaagtgatccacccgccttggcctcctaaagtgctgggattacaggctacaggcatgagccaccacacccggcccaatctatttatttattttatttttttatttattttctttttggtcgttttttaatttaaagaaaaattttaagattttcaattcctacgagatgggggtggggctaaggaggggctcagggtgcattgggaggttcggctctcatcctatgccccctacccgccgacctcaaaggacttttgagaattcagtgtgccaatgtttgcaaagcattacacacagggcctgatagacagcaagcattcaataaatgctagctatggccgggtgtagtggctcatgcctgtaatcccagcattgtgggaggcccaggctggaggattgcctgagctcagaagttcaagaccagcctgtgtaacacagtgagacatcatctctactaaaaactaaaaaaaaaaaaaaaaaatagccaacgtggcagtgcatgcctgtagtcctagttactagggaggctgagacaggaggaccacttgagccccagaggtcaaggctgcaatgagtggtgatccaacaaccactgcactccagcctaggagacagagcaagaccctgtctcaaaaaaataaaataaaataaaataaaagttagttattactattattctctgattcaaagttctctagatatgtgcacatttgcgatcagaacttggcctggtctgaccaggcatggtggctcacgcctgtaatcccacctctttaggaggccgagcaggcaggattgattgagcccaggagatccaggctgcagtgagctatgatcaggccactgcactccagcctaagcaacagagcaagaccaagcaagaccctgtatcacaggaaaaaaaaaaaaaaaaaaagaacttggcttggcctaggatggggcgcggccagaatgccttgcttaggggcgaggcccacagcgccccgatggctgcccagcgagcaactgagcaaccaggctgatgttacaggttctacaggttgggtgaaagccacgcccggccacccctacacaaatgagttgctccccgcccccacagtcttgaacgccatcctcccgcctggcttcttcgggactcaggagtatcttaactctggcctgatttctcccatgccacaccattaggggcacccagaaatcttgttgccaaattcctgccccctcagacacccactttcaaacccttgcttctagggaacccaagggcctggtggctctgtgcctccttcctcggagacagagagagagcaatgcctccctgaccggttcctccttgaaatctcagttatctgacctttaatcccatgccacgaccaaagacccataccttcgacaaggcgctgtgtccaagtcccacctctcggtagctcccagcccttcccctcccctctccaagaagagtcccgtggcagggcaaaatggctcacgcctgtaatcccagcactttaggaggccgaggcggatgcatcgcttgagctcagaagttcaagaccagcctgggcaacatggtgagaccccgtctctactaaaaatacaaaaaataaaataaaataaaatagccaggactgctgatgcgcgcctgtgaccccagctactcaggagggtgaggtgggaggatcacttgagcctgggagacagaggttgcagtgagctaagatctcaccactgcactccagcctgggtgaaaaagcaagaccctgtctcaaaaaaaaaaagtcccaggcctcccctagccccttgcccctctctgaagggacccagatatcctacctgcacttcccacccacacactgagaagccccctcctaccgctacccaccaaagccaccccaccctgctcctttttgagaatcaaactcaaaccgcaccagctaatttttttttcttttttgtatttttagtagagacacggtttcaccatgttggccaggctggtctcgaactcctgacctcaggtgatccgcctgcctcggcctcctaaagtgctgggattacagttgtgagtcatcgcgcccagccacattttattttatttttaaaaattttttagagatagggcctcactatgttgcccaggctggttttgaactcctgggctcaggtgatccttccacctcggccacccaaagtgctgggattacaagcatgagccaccgctcccggcctccaaatcccacctcttgaagacccacgtgccaggtcctccagcccccgccccctttggagacactggtacctgcaggcccctccccggttctctaggacccgccctctcctttcactctgggcgaggccgcccctatcccagccgcaccggtccttcccggcacacgcgaggctcccatggctctggcggtggccccgtgggggcgacagtgggaagaggcccgcgccctgggccgggcagtcaggatgctgcagcgcctagaagagcaatgcgtcgacccccggctgtccgtgagtcccccttcgctgcgggacctgctgccccgcacagcgcagctgcttcgagaggtggcccattctcggcgggcggccggcggaggcggccccgggggtcccggcggctctggggactttctactcatctacctggccaatctggaggccaagagcaggcaggtggccgcgctgctgcctccccggggccgaaggagtgccaacgacgagctcttccgggcgggctccagactcaggtgagccttcgccccagaacaaagtcctctggggtgaggcccaggtcttgctcccagcccctcctcccccagacccaggaacttaggcccccaccccctcctccctcagacccaggaactcaggcccccaccacctcctccctcagactcagggctccagcccccagcccctcctccctcagacccaggggtccaggccccagcccctcctccctcagacccaggaactcaggcccccaccccctcctccctcagactcagggctccagcccccagcccctcctccctcagacccaggggtccaggccccagcccctcctccctcagacccaggaactcaggcccccaccccctcctccctcagactcagggctccagcccccagcccctcctccctcagacccaggggtccaggccccagcccctcctccctcagacccaggaactcaggcccccatcccctcctccctcagactcaggggtccaggcccccagcccctcctccctcagacccaggggtccaggccccagcccctcctccctcagacccagaaactcaggcccccatcccctcctccctcagacccagggatccaggccccagcccctcctccctcagacccaggggtccaggccccagcccctccttcctaagggaacctggaaaatgggccacccagttttctccttccttgggcacccatgccctcagcccgattttgccatttccttggtcacccagcagcccaattctggttcccactatcccactatctcagaattcagggaccccatggggtttcctacactgaggataaaataaaagttagctattactattattctctgattcaaagttttctagatgtgtgcacatttgtgatcagaacttggcctggtctggctgggtacggtggctcacacctgtaatcccagctctttgggaggcccagctgggaggatcaggcctcagaatgtggagaccccatgggctcctaggtggaggagaggtagatggacacacccaaagaaactgatcattaggcccccatcacggtttctgcctggactacccacttggtctttagttcctgaggaacagctggctccagacccaggacctgcctggaggccacccctctgctgttctgcactgaggaaggaatctcagagtgaccaggcagatgaggtttggggcccagagcccagaacaaggtctagttcagggacccatgccacttctttatattaaatattttgtagtgtctctttttttttttttttggacacaaggtctggccctgtcgcccagactggagggcagtggcaccatcatgactcactgcagcctccaactcctgggctcaagtgatcctcccacctcagcctcccatgtagctgggaccacaggcgtgcaccaccatgccagactaatctttttattttttggtagagaggaggtcttgctatgttggctaggccggtctcaaactcctggcctcatgcgatcttcgtacctcagcctcccaaagtgctgagattataggtgagagccaccatgtccagccaagtgtttccttaattcatcctgagaggacatgcagaggttcaacaacctacccacctatagttttttaatcactataatgcccaaattataagagagtgatcaaaggaatttttttcataaatattatctatgttttaaatgaaaatgccaaggcacaattattcttggaaggcagagctgactagtcagacactcgtacctgtaggtagaaccactgtcatacagaatcaaatagtcttcccttaatatataggagagctggatttctgcaaaattcagcgtaatttttttttttttttagacatggtctcactctgttgcccaggctggagtgcagtggcgcaattttgactcactgcagcctctgcctcccatgttcaagcaattctcctgcctcagcctcccaagtagctgggattacaggcacccgccaccacgcagcgataatttttatagtttttattagagacagggtttcaccatgttggccaggctgttctcaaactcctgacctcaagtgatccacccacctcagcctcccagagtgctgggattacaggcatgagccactgcttctggccaaaatctaataaaagccatgtatatcgtttttaatttttttttttttttttttttgagatggagtcttattctgtcatccaggctggagtgcagtggcgtgatctcagctcactgctacctctgcctcccgggctccagcgattctcctgcctcagcctcctgagtagctgggattataggcgggcgccaccacgccaggctaatttttgtattttcagtacagacagggtttcaccatg[137 bp omitted]agccttatccctgcaggtgttccccatgaggggaggaagagggtgtcagtgggagccccaaggatagccagagtccttgcccatccccacaggcgacagctggccaagctggccatcatcttcagccacatgcacgcagagctgcacgcactcttccccgggggaaagtactgtggacacatgtaccagctcaccaaggcccccgcccacaccttctggagggaaagttgcggagcccggtgagtaagcccttgtcctcagctcccggagccccatcctgccctggcccagggacccaggggtccaggcccacagctgcttctttcctggagaccctcccatcataggctctgggaggcctcagcggtgtctcccccacccctctcccacccaggtgtgtgctgccctgggctgagtttgagtccctcctgggcacctgccaccctgtggaaccaggctgcacagccctggccttgcgcaccaccattgacctcacctgcagcgggcacgtgtccatcttcgagttcgacgtcttcaccaggctctttcaggtcagggaaggccaaggctgggagctagacttgggtccaggaggaagtagagggctgaatcctggattcctgggtctgagggaggaagggccgggacctggactcctggatctgagggaggaggggccggggcctggactcctgggtctgagggaggagggggctgggacctggactcctgggtctgagggaggaggggctgggggcctggactcctgggtctgagggaggagggggctggggacctggactcctgggtctgagggaggaggggccggggacctggactcctgggtctgagggaggaaggcctggggcctggactcctgggtctgagggaggagggcctggggcctggactcctgggtctgagggaggagggcctggggcctggactcctgggtctgagggaggagggggctggagacctggactccagggtctgagggaggagggggtgagggcccggactccagggtttgagggaggagagggcggggggcctggactcttgggtctgagggaggagggcctggggcctggattcctgggtctgagggaggagggcctggggcctggactcctgggtctgagggaggaggggctggggcctggactcctgggtctgagggaggaggggctggagacctggactccagggtctgagggaggaggggctggagacctggactcctgggtctgagggaggaggggctggagacctggactccagggtctgagggaggagggggtgagggcctggactccagggtttgagggaggggagggctgggggcctggactcttgggtctgagggaggaggaagctagggtcccaaactcctgagttctggagaaagaagagcttggggtcttgtaaaagggatatgcctgaggcccaccatgggtgtgaaggaggtggttggatcctcgagccctagggactacttagggatgtgagctgcttccctggtcgctccctgacccaagccctgccccaccccagccatggccaacactcctcaagaactggcagctcctggcagtcaaccacccaggctacatggccttcctcacctatgatgaggtccaagagcgtctgcaggcctgcagggacaagccaggcaggtaaagggtccagggctcagcagaacaaggctgcagggctcagggatctgggctctgggctggtgcgtggtggagcccagatgtccttccaagagtgggaacagaggtacccaggaccccagagagttgataactcagaggcaggacactgagtgcccctcccagcccgcctcttctctcgaggcctcctgtactgtcccataatcctgcagctaagggacagtgcccgctctagcaaggagcccaaagacccgcttgagggtaaggtccgtttctggtaggtcagagtcatgttgtaccatctgttcagtattttgagtatgaatttcccacctgttggcataggagactgaaaaacaagacatgagagtccttaaattatttcaaccaggagttttgagctgttgggtccccctagagggctgagaattgagctgtctagataccaagagaagagaaggtcaggtttgtgagtctctgcagggctgaggtgcaggggtaggacggtgagtgcgttagcattcttccagttacacttcaaacttatttaagggaaaagaaaaaggaaagaataaattcctataattgaaaaggccaggccccgcacagtggctcacacctgtaatcccagtactttgggaggccgaggcgggcaaatcacttgaggtcaggagttcgagaccagcctggccaacatggtgaaacctcatctctactaaaaatacaaaaattaggcctggcgcagtggctcacgcctgtaattccagcattttgggaggccgaggtgggtggatcacctgaggtcaggagttcaagaccagcctggccaacatagtgaaaccccatctctactaaaaataccaaaaatttagccaagcgtggtggcgtgcacctgtaatcccagctacttgggaggctgagacaggagaatcacttgaacccaggaagtggaggttgcagtgagccaagatcacgccattgcactcctgcctgggcaacaagagtgaaactccatctcaaaaaaaaaaaaaatacaaaaattagcctggcatggtgatgcgtgcctatagtcccagctacttgggaggttgaggcacaagaatcacttgaactcgaaaggtggaggttgcagtgagccaggatcccgccactgcactccagcctgggcaacagagcaagactctgtctcaaaaacaaaaaggaagaaaagaaaagaagcctagggtgtgggtttcaggcacagctagatccaggtgctcaatggctactgtcaggaatcagttcctgttcatcccctttctctgctttcctctgtttgcttcattctcaaacatggtttctcctcattgtggcaaatgacttctagaagtcccagctgtgtaccctaccttcttagcaacctctgtaagaaagggggcaccttgctctgacacttgcagcgaaagtcccagaacggactcccatcactgtggtcaggggtcctgaaatgcactgattggccaccccagccttgtttaaactccagtgaagcgaggagagatctccaaatggaatcagggctgtttttatcataaaagagccaagcaggcaaaaacagcatatatcccctagagaggcaggcaggggtctagcacatgccgttgcctagaggatgggaagctgggggtgaggacctagacacctggattcccaacaggccaggggactggaagttcacaaaagggatggcagtgaccactccctcaccccatcctacctacctctccctccagttacatcttccggcccagctgtactcgcctggggcagtgggccatcggctatgtgagctcagatggcagcatcctgcagaccatccctgccaacaaacccctgtcccaggtgctcctggagggacagaaggacggcttgtgagtctccattctggtaggaggagggtgtcagcaaaatctggttggaaagatcttgcatgttgtgcactgccggtggccaccacgtttgagggtgcaaccattcacataggggacatctcaaatctgcagtactacaaaattccagcaggtggcagtcaaaggtcttgaggaaggggcgcctctgagggtcgcacaaagtggccatagatcgggcccagccacagctccgaggagaagtgtgtggggcattgggcacaaccgcaagggctccattccttggaactgagctcaagagcgtttgcttctattttcttcctcttttactttagttaatttttaaaaaatgagatggggtttcgccatgctgcccaggctggtctggagctcctgggctcaagcgatcttcctgcctcggcctcccaaagtgttgaaatgacaggcgtgagccaccgtgcccagccagcttttgtttctagatatgagatcctgctctagaatctagattgatgg[137 bp omitted]acctctgcctcccagattcaagcgattctcctgcctcagccgcctgagtaggtgggattacaggcacccaccaccacacccggctaattttttgtgtgtgtttttagtagagacagggtttcaccatgttggtcaggctggtctcgaactcctgacctcatgatccacccacctcggcctcccaaaatgctgattacaggcatgagccaccatgcccggtcctaagttttggatttttaatagagatggggttttgccatgccaggctggtctcaaactcctgacctccagtgatcttcccttctcgaactcccaaagtgctgggattacaggtgtgagccactgtgcccggccaggaagacaggtttcttttcagagtttcacctttagccagaattttcttatcagtcatatctatatgactactgacatacaagagaggagataggaaggtaggtagctagctagatagtcagataggtagatagatagatagatagatagatagatagatagatagataggcagataggtagatatgctgttgattatttgcaataattattat[132 bp omitted]atggtgaaaccccatctctactaaaaattaaaaaaaattagctgggtgcagtggcgtgcacctgtaatcccaactactccagaggcagaggcagaattgcttgaacctggcaggtggaggtttcggtgagctgatatcacgccactgcactccagcctgggtgacagagcgagactccatctgaaaaaaacaaaacaaaaaaattttattgtatatttggtagagatgggggtggggtgtggctcaccatgttgcctaggctggtctcgaactcctgaactcaagcaatctgcccgcctcaccctcccacagtgctcagattacaggtgtgaaccacacgcctggccaatttatagtaattatcttctataaaatcaccacacaccctgaattattgaatatcaagccgttgctcccaggggaaatacattcttgggtcctgagtagctaggactacaggtgcacgccaccacgcccggctgggtcaccacatttttgtcaaccagtcacaacatagtaacctttatgtatgttttcgtttaaagacactttattcaaggccgggcgcagtggctcacacctgtaatcccagcactttggaacaccgagtcgcgcagaacacgaggtcaggagatcgagaccatcctgcctaacactgtgaaaccccgtctctactaaaaacacacaaaaaaaattagccgggcgtggtggcgggcacctgtagtcccagctactcaggaggctgaggcaggagaatggcgtgaaccctggaggcggaggttgcagtgagccgagatcgtgccactgcactccagcctgagcgacagagcaagactccgtctcagaaaaaaaaaaaagaaaaaaagaaaaaaaaattgacactttattcagtacctattgttggttcgctaacattgaactcacaaccaacagcagtataacttgtgtctcagcaaagcttatacaacacacacgttttctccataagacacatcacagccttctttcacttaggaacaggagacaacacttcagctactcttggggaccatttaaaacagaaaaatcagaggccgggcatggtggctcatgcctgtaatcccagcactttgggagactgaggcaggcagatcacttgagatcaggagttcgagaccagcctggccaacatggtgaaacctggtatctagccaggcatggtggtgtatgcctataatcccagctactcaggaggctgagacgagaattgcttgaacccgggaggttgaggctgcagtgagccaagatcacgcctctgcattccagcttgggtgacagagtgagattccatctcaaaaacataaaaataaagtcaatcataagctgggcgcagtggctcacgcctgtaatcccagcactttaagaggctgaggtgggtggatcaccaggccaggagatcgagaccatcttggctaacacggtgaaaccctgtctctactgaaaataacaaaaaattagctgggcgcagtggcgggcgtctgtagtcccagctactcaggaggctgaggcaggagaatggcgtgaactcgggaggtggagcttgcagtgagccgagatcgcgccactgtacttcagcctgggtgacagaaccagactctgtctcaaaaaataaaaataaaaataaaataaagtcaatcgtagaagtcccttcttattgggtgtttatgcacagaggaggacgctgcatttaaaatttttttctaatttaaaaaattta[210 bp omitted]gaggcaagagaattgcttgaacccgagaggcagaggttgcagtgagccgagatcacgccattgccctccagcctagggcacaagagtgagacttcatctcaaaaaaaaaaaaaaaaaatttattcgccaagcatggtggctcatgcctgaaatcctagaactttgtgggaggatcacttgagcccaagagtttgagaccaacctggacaacatagtgagcccccatctcaataaagagaaaaaaagaaaaaaaaaattagttaccgacaaggtatcactatgttgtccaggctggcctcaaactgctgggctcaagcgaccctccctcttcggcctcccaaagtgctggggttacaggtgtaaaccactgcacctggccagcgcttcatgtttcttttggtggttctttttttttctgtgacagggtctcactgtcacccaggctggagtgcagtgacatgaacacggctcactgctgcagcctcgacctcccaggctcaggggattctctcgcttcagcctctcctgagtagctgagaccacacgcacatgccaccatgcccagctaatttttttaatttttttttttttagacatagtgtctttctgtgttgcccaggctggtctcgaacccctgggctcaagcaatcctcccgcctcagcctctcagagtgctgggattcaggcatgagccactgctcccagccagggctgcatgttttataagcactgtctttcttatttatttatttttaaaatttcttttttttttttttttttgagacagagtcttgctgtgttgcccaggctcgagtgcagtggtgcgatatccattcactacaatctctgcctcctgggttcatgaaattctcctgcctcagcctcccaagtagctgtgattacagacacgcacctccatgcctggctaattattattgtatttatttatttattttgctatttttagtagaaacggggtttcaccatgttggccaggctggtctcaaactcctggcctcaaatgatctgcctgccttggcctcccaaagttctgggattacaggtgtgagccactgtacccggccagcactgtcttatttaatccatcacaaatctttgcctcaggcatgatcatgtccatgttacagaaggggaaactgaggccagaaaggtcgagtggccccagccaggtcacacagtgtgttagtgagagagccactgtggggcccaggtcagggatcctgcactgctccacatgacaggccaggcagggccactagcctcagggagtctgagggtccaatatttcatgtgctatacatgtcggaataactggagtagcattgaggcatgccagataggccgaggaaatgatccagggggagacccagggagcccagagcttgcttctccggtgtcctggagcccagtgctgagatctcgcctacaaccctggttctcggtctctctggtccttgctgtgtgaccttgggcaaatgcctttcccaccctgagccttgggtcactgtctgtgagggaagaagtggtacaggtgctctcagaggatctttccatcctgatattatcagattctaggatttgatcactttcatgatctgtgacactaaaatctgttatgcttgggcgtggagaagggtgaggttctagaagagctaagccagagattttcccttttttttttttgagacagagtctcactctgttgcccaggctgcagtgcaatggcatgatcttggctcactgcaacctctgcctcctggattcaagcaattctcctgactcagcctcctgagtagcatgcaccaccacgcccagctaatttttatattttcagtagagacggggttcca[134 bp omitted]cttagtctatctcatccttgtttctggagcttgagtcactgaggttttgtgtgccctaccttgggagtctgaggggacatagccctgccctggggtatctgagaagacacagtcccaattagaggtgggtggagggaaaataagcccaggccagcaatggatttgggacagatcctcaactcagggaaatatggggccctgtagggggtaaaggtacttgttcatctgggggtgggaaatactggatggccccccagtccccctctcttcccttcccccagctacctctacccagatggaaagacccacaacccagacctgactgagctcggccaggcagaaccccagcagcgcatccacgtgtcagaggtgagacccgcacctgcacccgcagtcccagttccctgaccctgccacccccacgttgccttggctcagaggcctggggttggaatgttggcttggtggctctgtgaccttgggtaaatcacttgacctctctgaggctcagttattcttccggaaaatacggctcctcctgcctctttcccaggggtgatcacggggattaaataaggaactgatgctgctgagatcatcaggacagctaatgcattcgagcatttgccagcaatagccccgtgccagctcctaatcttcacagccaccctacgagtgagaaaaacaacaataacaaataaataatttattttttatttatttttatttttagagacagaatctcttctgtcgcccaggctggagtgcagtggtgcgatcatggctcactgcagcctcgacctctgggctcaagcaggcctcccacctcagcctcccgagcagccaggagtacaggtgtgagccactgcacccagctaatttttgtatttctctgtagagatggggtttcgccatgttgcccaagctggttttgaactcctaggttccagcaatcctcccgcctccacctcccaaagtgctgggattatagccatgagccactgtatctggccctaaattttttttagtataaatatatcccgtgcaatatttgggacatccttatacttcaaattgtattcacggtttacatgaaattcaaatttggaggccgggtgccaccgcacccataatcccagcactttggtaggccgaggccggcagatcacctgaggtcaggagttcaagaccagcctggccaacatagtgaaacccatctctaccaaaaatacaaaaattagctgggtgtggtggctcacacctgtagtcccagctgaggcacttgagttgggaggctgaggcacgagaatcacttgaacccaggaggcggaggttgcagtgagctgagatcacaccattgcactccagcctgggcaacagagtgagacttggtctcaagaaagaaaaaaaaaaagaaagaaagaaattcaaatttaggttaggcacagtggttcatgcctgtaatcctagtactttgggaggctgaggcgggtggatcacttgagcctgggagttggcggttgcagtaggccaagattgcgaccctgcacttcaacctgggtaacggagtggggctctgtcccgcaaaaaaaaaaaaaaagaaagaaagaaaaataatgaaattcaaatttagcagcatcagcatccaatacttttatttgctaaatctggcaccactgggtgtagacaactggggagaagaagtctcataacaaggagtgaagacatggccgggcgaggtggctcacgcctgtaattccagcactttgggaggccaaggcgggcagattacttgaggtcaggagttcgagactagcatggccaacatggtgaaaccccatctctactaaacatacaaaaattagccaggtatggtggcttatgcctgtagtcccagctactcaggaggctgaggcacaagaatcgcttgaacctggaggcaaaggttgcagtgagccaagatcgcgccactgcactccagcctgggcaacagagcaagactgcgtctccaaaaaaaaaaaaaaaaaatgagtgtagacatgtaggaggccattggacatgccagccttggacttaggagagggttcagttctggcacagaggtttggtttattattttttttttaaatagagacggggtcttactatgctgcccacgctggtccagaactcctgggctcaagcattccacctgccttggccgccagaagtgctgggattacaggcatgagccacagcgccaagatagaggaggtgtgggattttctttctttcttttttttttttttgagacggagttttgctcttgttacccaggctggagtgcaatggtgcaatctcagctcactgtaacctccatctcccgggttcaagcgattctcctgcctc[222 bp omitted]cgtggctgacgcatgcccctcgctgtcttctctatcctctcacctgccaggagcagctgcagctctactgggccatggactccacatttgagctctgcaagatctgtgctgagagcaacaaggatgtgaagattgagccgtgcgggcacctgctctgcagctgctgcctggctgcctggcaggtgggtctgacccctgtggcgccttcccctctggtctccccctctctacagggaaagccccaaaaggatctccatgcctcattgatcatatggggaaaccgaaggccagagagggcaaagagctgatggcaaccactcaggagcccggctgtctttcccagggcctctggttccatcccactctgcacacgctgcctctgtttctccctctccggcaatgttatcagtggaaagctctccttccttctctgcctaggtgatccccagccagtggcttcacgtctctgagccttagcctcgtcccctggagaacggggctgagaatagtgacctcccaaaggccacagtgaggctgggcacggtggctcacgcctgtaatctcagcactttgggaggccggggtgggtggatcacttgaggtcaggagttcgagaccagcctggccaacatggtgaaaacccgtgtctactaaaaaaaaaatacaaaaattagacgggtgtggtggtaggggcctgtaatcccagctgctcgggaggctgaggcatgagaatcacttgaacctgggaggcagaggttgcagtgagcagagatcgtgccgctgcactccagcttgggtgacagagcgagactccgtttttttaaaaaacaacaacagcaagggccacctgagggtctgagcctggaaaggcctggcccggaagctgtggccacagctccatggggatccctggcctgtgtgccccctcctgacctcggctctggttccgttcctctctcaccttccctcccagcatttccctccacattcctctgctctccacgactcttctctccttccgtctcccttcctctgtctgtcttccccacatcaatcttttgggcggggagctcctcgttggcccaagggacaggatggagagcaggggagcactgaccctttccctcccgacctcccccagcactcggacagccagacctgccccttctgccgctgcgagatcaagggctgggaggccgtgagtatctaccagttccacggtcaggctactgctgaggactcagggaacagcagtgaccaggaaggcagggagttggagctggggcaggtgagcagggccagccgggagctggaatccaaattcctgaggcctgagtggggagggactggagcctggactcctgggtctgagggaggagagactgggggcctggactcctgggtctgagggaagaggggttggagcctgtactctgagtctaagggaggagggctgggggtcctggactcctgggtctgagggaggaggggctaggggcctggactcctgggtctgatggaggtgggtatggggacctggactcctgggtctgagggaggagaatatgggggcccggactcctgggtctgagggaggaagagctgagggcccacactcctgggttctaggagaggagggggctgataacaagattctcaggtcctagggaactggtcttttgcttccccaagggctggggctgtggctttccctggctgtaaccctcctaagtgttcatacgttgtcttggtctctgttatatcttgagtctagaacagtgcctgaatgctgagtcccaggcaggagaacatggaggcgagaagaaaatggcagctcacaagccccttctccttcctctgtcccaccccaggtgcccctttcggctcctccattgcccccacggccagatctgccccccaggaagcccagaaatgcccagccgaaagtggtgagtcaggcgctggtctgaggttgggggctggggtctcactcacctccagggtccctggttcacctgtgcactcaggggtgccagggcagggactcatccttggcacccatttccaaggcacccatcccctctgtgacctcttcccttgttttcattccccctctgggactttctttttttttttttttttttttttttgagacggaatcttgttctgtcgctcaggctggagtgcagtggcgcaatcttggctcactgcaacctccacctcccgggttcaagaaattctcctgcctcagcctcctgagtagctgggattacaggcacccaccaccatgccccgctaatttttgtatttttagtacagacagaatttcaccatgttgatcaggctggtctagaactcctgacttcattatctgcccccctcagcctcccacagtgcggggattacaggagtgagccactgcgcctggcctcaaggactttctagctctccttccagcatcccagatgtgtcctacctcggggcctttgcataagctgttcccttggcctgcacagtctttcctgaggcttgctttcccatcccttttcagggaggccttccctgaccactctgttcaagatagcacccctagctggggtggtggctcatgcctgcaatcccagtactttttttttttttttttgagaggagtctcactctgtagcccaggctgcagtgcagtggcataatctcggctcacagcaacctctgcctcccagattcaagcaatgctcctgcttcagcctcctaagtagctgggactacaggcacccaccaccatgcccgactaatttttggatttttagtagagacgaggttttgccacattggccaggctggtctcaaacccctgccctcagctgatccaccgccttggcctcccaaagtgctgggattacaggcatgagccaccatgcccggcctgcaatcccaacactttgggaggccaaggcaggaggacggcttgagcccaggcatttgagaccagcctgggcaacatcacaagaccccaacactacaaaaaaattttaaaattagcccaaagtggtggcgcacacccgtagtcccagctgctcaggaggctgaggtgggagggtcccttgatcccaggagttggtagctccagtgaggcgtgatcacaccactgcactccagcctgggcaacagaatgagaccctgtctctaaaccaataaaaaaaaagagtctgtaatcccagctgttagggaggcagaggcaggaggaaagcttgagcccaggattttgagacctttctgggcaatatagcggaaccccgttctctaaaaaaaaaaagaaaagatgaaaatagcaccgctgtccctcggggccctgctctgctgtatgttcaaagatctttcgccacccggcagagcttagggttggttttgtcggcttttatcactgtcaggttgcaaccttcctgcaggtcaggcctttgttgtcttctccgtcatatctccagagtgcagaacagtgcctagcacacatacacgtcataggtgctcaataaatagatgccaaatgaatacactgaagtgagtcttcccaacagccctatgaagtcaaaagtgttcctctcccggctgggcgcggtggcttatgcctgtaatcccaacattttgggaaggtgaggcaggtggatcactgagttcaggagttcgagaccagcctaaccaacatggtgaaaccctgtctctactaaaaatgcaaaaattagctgggcgtggtggcgcacacctgtaatcccagctacttggaagactgtggcaggagaatcgcttgaacccgggaggtggaggttgcagtgagccaagatcgcgccactgcactccagcctggatgacagagggtgagaccctgtctcaaaaaacaaacaaacaaatgaatgttcctctccccattttccagaggaaaaaagttcagagaggtgacagtacctgcccaaaaccacacagcctgaaagaggagaagtcagcgttggagtctttaaggcccccaaaccatctacttatttttttgttgtttctttgtttgtttgtttttcttttgagatggagtttcactcttgttgcccaggctggagtgaaatattatgatctcagctcactgcaacctccgcctctggggttcaagctaattctcctgcctcagcctcctgagtagctgggattacaggcaggtgccaccacgcctggcaaattttgtattttttagtagagatggggtttc[132 bp omitted]ctttcttttctccctacgctgccaccccaggatttttgggaccctggattgctggggagaagcagatctcttagtatctccggctgagtacacacaggcttcgatcaatactgagctgtcttcaaacaaacagctcaggaagtccgggaacattattcgaccacagcaaacaagagagccagcaggaagcggggcggtgggggggagggtggcggtgaaaccagccagggaagctaaaaacagatccaacctgccgccaaaagcaaatggaaacattaggaggcactcagccggctcccagaggacagtgatgggggacacagccaggacagcaggctgacagggacctcgggcctgatggtgacacctttgcctaggccataccctccgcctcccccaccctttcctcctctccccaaaccctgcctgattaaaattccagtccactcccacctagtctttcattcttcaaaacataccacagaagagacagccttgggtttgttacttctcagcaaggcactgtcataacttttgttgttgttgttgttgtttgagatggagtctcactttgtcacccaggctggagtgcagtggcacgatctcagcccattgcaacctccgcctgccaggttcaagcgattctcctgcctcagcctcccgagtagatggggtcacaggtgctcaccaccatgcctggctaatttttgtatttttagtagagacagggtttcatcatgttggccaggctggtcttgaactccttacctccggtcatctgcctgcctcggccttcttaagtgctgggactacaggagtgggccccgcctgtcataacttttgctatgtgcctggcattgctttttttttttttttaagatggggtctctgtctagcggagtgtggtggcgtgcacctgtaatcccagctactcaggaggctgaggcaggagaatcgcttgaacccaggaggcagaggttgcagtgagccaagatagcgccattgcactccagcctgggcgacagagcaagactccatctcaaaaaaaaaaaatagggtctctgtcagccaggctggagtgcagtggtacaatcacagctcactatagcctcaatcttctgggctcaagtgatcctccctccttagcccccagagtagctgggactacaggtgcctgtctccacacccgaatcatttttaaattttttgagcagtgaggctggggctgctgtggacactggatgtgatgggactgtgtcagtggtcagtgtcaccgtggttgtgatctgtgtatggtgctgtggcccctggggttgctgtctgcacgctgctgttctccatctgagaaacctccctttaggggacgacactgccattgagctggatctcatcaccccactgaccactgaggacctctctgaccctcagtgttttcatggggaaaatggggaccagcctgacacaagccccacaggctgggtttttttgtttgtttgtttgtttgttttaatgttttaatttaattagagacagagtctcaccgtgttgccgaagttggtctctaactcctgggctcaagtctcccaaagtgctgggattgctggcattagccacttcgtctagcctccccatgagttttgatgaagccagcaagctcagtcatctctaacctgagtcatatcccctccctcacctctcagaaatctccactggcagccaagcgcggtggctcacacgtgtaatctcagcactttgggaggccgaggtgggcaaatcctttgcttgaggtcaggagttcgagaccagcccggccaacatggtgaaaccccgtctctactaaaaaatacaaaaattagctaggcgtggtggcgggcacccgtaatcccagctactcgggaggctgaggtaggagaatcgcttgattctcgcttgattatcgcttccgccaggaggtggaagttgcagtgagccaagattgtgccactgcactctagcctgggcgacggtgcaaaaactccgtctcaaaaagaaagaaagaaagaaagaaatccccactggctccccagggctctaagaactcaagccaaagtcctctccgccgcccaaagacctggggctggggatctgactcttccccacctctctgatctcccctactccacctcctttccggcaacattggacccttgctgctcttctaacttgccagcaagcctccactcactcggagcctctgtctggatccttcttgcactcaggcatcagctgggtcattcccatctccaagaggcctccccggcatcttccctctcccaggcactttgaaggacatggaacttgctctgggacatttccttgttcaggagctgatcagtcactgcgagcctcgggttcagtggagcatcagctccaccaggacaaagatagttttctgtcttgttcacagctgtcttctcagagcgaaaaacagggccttggcctggcgcggtggctcatgcctgtaatcccagcactttgggaggctgaggcaggaggatggtttaagcccaggaggtcaaggctgcagtgagctatggtcccatcactgcactccagacgaggcaacagagcgagaccctgttttgctttgttttgttttgagacagtttcgctcttgttgcccaggctggagtgcagtggtgcaatcttggcttatggcaatccccacctcctgggttcaaacgattctcctgcctcagcctcccaagtagctggaattacaggaatgtgccaccacccctggctaatttcgtatttttcatagagacagggtttcaccatattggccaggctggtctcaaactcctgacctcaggtgatccacccacctcggcctcccaaagtgctgggattacgggtgtgagccaccgcgcgtggcccctgttttttcggtttgttgttgttgttgttgttgtttttaaaaaagaaagaaaagtaaagaaagagagagagaaagaaagggagagaaagaaggagggagagagaaaggaaagagagagaaatagaaaaagaaagaaagggagggagggaaagagaaaaaagaaagaaggaaggaaggagagagcgagagagaaagaagaaagaaagaaaagaaaagaaagaaaaagaagaaaaaagaaagagaaaaggaaaagagaataaaagaaagaaagggcctgacccactggagaggcttgggaactgtctgtggggcacacaagtgagcagaagggtggacacatggatggacaggcggacagacaaactgaaacttcatcctacacgagttagaggtgagagggaaaaggcagcatggactagggacaaggccaaaggtcctgtcagatggtggccgccaccactgtgtcacccctgtccagggcctgtgaaaggacgtccacccaggctgcagcctagcagagacatttcttcatctcctccccccaggcacttttggccctccccagacttcgggcccctcttctcttgccaagaattaaggctgtggcctcagccgcgcaggaagccacctccagcccccaggtggtctgggactcccaggtctaagacaaaggggacagggaagaggggcagagggaaagattggatgccgggaatcaaccgccctctcaaaatatctccattgcagagactcctaaaggggaactcccctccagctgcgctgggaccccaggaccctgccccggcctgaaggccaggtgagtccattccctaaccctccctggcccactccaccccactccaccctcctccacctggaggtgacctcatctaacccacccctctctccgcctacagggcacccagatgtgctgctcaagggagccccaagggctggaagggggttgtgaaaccgaaataaactgccaagcctggtctgtcctccagggtgcaaaggaagagtgcagtggccagcagggggcagcagagggcagcaggcactgggaaagggccgtccccaggcctggtccccacctgaacaacaggagtccaggccccagcccctcctccctcagactcaggagtccatactccagcccctcctccctcagacccaggagtccatactgcagcccctcctccctcagacccaggagtccatactccagcccctcctccctcagacccaggagtccatactccagcccctcctccctcagacccaggagtccatactgcagcccctccttcctcagacccaggagtccatactccagcccctcctccctcagacccaggagtccatactgcagcccctcctccctcagacccaggagtccatactgcagcccctccttcctcagacccaggaatccatactgcagccccttctccctcagacccaggagtccaggccccagcccctcctccctcagacccaggagtccatactgcagcccctcctccctcagacccaggagtccatactccagcccctcctccctcagacccaggagtccatactgcagccccttctccctcagacccaggagtccaggccccagcccctcctccctcagacccaggagtccatactgcagcccctcctccctcagacccaggagtccatactccagcccctcctccctcagacccaggagtccatactgcagcccctccttcctcagacccaggagtccatactgcagccccttctccctcagacccaggagtccaggccccagcccctcctccctcagacccaggagtccatactgcagcccctcctccctcagacccaggagtccatactccagcccctcctccctcagacccaggagtccatactgcagccccttctccctcagacccaggagtccatactgcagcccctccttcctcagacccaggagtccatactgcagccccttctccctcagacccaggagtccaggccccagcccctcctccctcagacccaggagtccatactgcagcccctcctccctcagacccaggagtccatactccagcccctcctccctcagacccaggagtccatactgcagcccctcctccctcagacccaggagtccatactgcagcccctccttcctcagacccagtagtccatactgcagcccctcctccctcagacccaggagtccaggccccagcccctcctccctcagacctaggagtccaggccccagcccctcctccctcagacccaggagtccagacccccaaccccttctccctcagacccaggagtccaggccccagcccctcctccctcagacccaggagtccagacccccaaccccttctccctcagacccaggagtccaggccccagcccctcctccctcagacccaggagtccaggtccccagcccctccaccctcagatcttcaaatggaatctggggccaggcacggtggcgcacgcttgtaattccaaggctttgggaggccaagtgggaaagactgagcctaggaagctgaggttgcagggagctgtgattgtgccacagcaatccagcctgggtgacagaccgagatcctgtcttaaaaaaagaaaaaaaaaaaaaagaaactgggcccccagccttctctgtgatacccaggagtcctgctctcaggatttagaagtccagaatcccaagttttctgagaatcgggcatccaaccctcctgcttcatcatggcaaaaaaaatccctggacctagacccagatatccaggttaagtccctggtcaaaaggaccacacatttccctgatggttatccaccttgccttgccacggtctgtgctcatccctctctctgtccttcattcctctctgacatctttctcccagagtaactgctaacttccagtctaaatcttgctgaggaagaagagataccacctcatgattcatcttggagtggcccaagcctccctccaccttgtttaaattgccccattcccggagaccttgccctgtgcccagcgctgggctgagcaatgctgaccaggaagcagtgatcactgccccactagggctcaccttccactagaggaaagagacctgtccctagacagtgatgacccagagtgggcatggctggggtagggaatcccagggggctacaggaacccagagtgggcacctgactcagcctgggaggtcagggagtgcttccaggaggaggcgatgtctgagctgatacttaaaagatgatgaggccagacgtggtggctcatgcctgtaatcccagcactttgggagactgaggcaggcgggatgcttgagctcagaagtttgagaacagcctgagcaacgtgatgaaactccatctccacaaaaaattttggaaaaattagccaggcatggtggcacatgcctgtaagtcctagctactcaggaggctgaggtgggaggatggcttgagcctgggaggtcaaggcttcagtgagccgagattgcaccactgcactccagcctgggcaacatggcaagaccctgtctcaaaaaagaaaagaaaattttttaaatgatgaaaaagtattccaat[131 bp omitted]aacatggtgaaaccccgtctgtactaaaaatacaaaaattagccaggcatggtggcgggcacctgtaatcccagctactcgggagactgaggcaagagaatcacttcaacccaggagatggaggttgcagtgagccgagattgtgccattgcactccagcctgggcaacaagagcgaaactctgaaaaaaaaaaaaaaaaaaggaaggaagggagggagagagaggaaaaggaaggagggaaggaaggaaggagagaaagaaaagaaaggaaggaagaaagaaagaaagaaaagaaagaaagagaattttcacagatttagttccaagcaacagatgctacctcaggggcagaaagggaatttattgagaggatttggggtcactcacagaatcccaggagtgaactggggaatcaggattggaaagtgagcaggaagaatcctggcaactggccagcaatggtaacccagccacagtgacaccacggaaccggtctgatgaggccatgctggcgatggccactagacactgtagttgtctcgctgcctctgctgccccagaaataggatatggctgctcttctcattagctgttgctggtaataaatcacttcacaacttagccgcaaatgacagcaatcattgcattaagtctcatggttgctgtgggctgggatttgaagaaaggcgtggctggtttgttttggctcaggatgcaaacaaacagtgcaatcagtgatgcttgccacagggcggctgggggtgctggacaagtgggcatctctctgtggtctcagggcctcccccaccatatagtctctgcactggccagcttgggcttccccacagcatggctgcctcaaggtagtcaaactttatatggccgctgaagacccaggcagaagctgcatggccttttctagctcattttgggagttccgcaacttcacttcagctgaattctgttggttgtatgcaagtcaccaaactgcacagatttgagaggagggtgccatagaccccagctcttgatggaaagagtatcaagctctcattgtggaaacacacatgggatgaaagacactgtcacaacatggcaaaaccccattcctacaaaaaaaaaaaaattaactaggagtggtggtgcacacctgtactcacagctacccaggaggctgaggtgagaggatcacttgagccctggaggacgaggctgcagtgagccatgatcatgccattgcactccaacctgggtgacagagcaagaccctgtctcaaaaagaaaaaagaaagagattgttgtagccgtctttggaaaacagaatctgtcccagctgccatgcatggctggaagaggtggccaattcctgatattcaaaagtgtggaaggatttgccaagcttaagtcaccttagctccaacagatgcaggaaagcaaacatccattcttgttggcttcaagagtgggcaacagaggctttcagacagtaggaatttccttaaatgtgggaaggagctgcagatgctaggtaatccttcccgcaaaatatgtactatagcccgctcctttggttttttttgttgtgttttgttttttagacaaggtctcactctttcacccaggctggagtgtagtagcacgatcttggctcattgcagccttgatctccccagttcaagcgatcctcccacctcagcctcctgagtagctgggactacgagcacaaaccaccaccacccccggttaatatgtattttttgtagatacagggttttgccatgttgcccaggctggtcccaaattcctgggctcaagcgatccacctgcctcagcctcccaaagtgctgggattgtaggtatgagccaccacagctggctttgaatgttcaatatcaataggccctttgcagaagttcttatcgaaactttccccgcacaaccgtctctcattgtacaatcaaaaaatgcattcacactgccacccaatacaaaaaatttcaatagttccattttccagatctgagactggaatcagggaagaaccattcccctccaaatatgtcattctccccatattccacaagctgtgagctagttgtaaagttaatcgtcacacactgtgtgaaaaataatgggaaaaaaggtcaagaaaagataagtcagccaggcactgtggcttccgcctgtaatcccaacattttgggaggctgaggctggtggatcacctgaggttaggggttcgaaaccagcctggccaacatggtgaaaccctgtctctactaaaaacacaaaattagccgggcatggtggcgcatgcctgtaatcccagctacttgggaggctgaggcaggagaattgcttgaacctgggaggcggaggttgcagtgagccaagatcacgccattgcattccagcctgggcaacaagagtgaaactctgtctcaaaaacaatgaaaaggtaagtctggccaaccgtggtggcccacacctataatcccagcactttgggaggctgaggtaggaggatcgcttgagcccagagtttcagaaaagataagccttgttagttaaaatatgtgaggatatacacctgcggccgcatggatggaattagaactttttttttttttttttttttttttgatactgagtctcgctctgtcacccaggctggggtgcaatggcatgatctcagctcactgcaacctccacctcctaggttcaagcaattctcctgcctcagcctcccgagtagctgggattacaggcacctgccacaacccctggctaatttttttattttaagtagagagggggtttcaccattttggccaggctggtctcaaactcctgacctcgggtgatccacccacctcggcctcccaaagtgctgggattgcaggcatgggccaccatgactggccatttttatatttttttgtagagacggggtttcgctatgttgcccaggctggtctcaaactcccgggctcaagcagtcctcccgcctcaggctcctaaattgctgggattacagacgtgagtccctgcggctgacctggacctcagcttttaccctaagtgagacagaagtcatgggaggaccctggggcagaagagtgacatgagttgattcacatgtaaaaggaatccttcaggctgttttgtgagaataaattacaggggacaaaggcagatgatgttacaagactagtttctgcaagtctgcaagggtccacggctgctgttttggtgtttctgacttttctccttcatacacatgccatagagttctcctccctcacccagaacctcagatggctaggttcttcttttttttttttttttttttgagacagaatttcactcttgttgcccaggcaacatcgtgcagtggcacgatctcagctcagtgcaacctccacctcccagattcaagcgattctcctgccttagcctcctgagtagctgagattacaggcatgtgccaccacgcccagctaattttgtatttttagtagagatgcggtttcaccatgttggtcaggctggtctcgaactcctgacctcaggtgatccacccacctcggcctcctaaagtgctgggattacaggcatgagccacagcgcccagcctcagctggctgggttcttgagggaggtggaagtgggcgatggctgctgagagggcatgtaccagggtccagcccaaacagaaggtgcacaggctggggacagaagagctagggtatgggtgtcggtgctcacagtgtgtgagcttgacagcacctgggactgtcttggagtgccgccgcattccccatgagtgagtttgtattgtatatcctgggatgctccagtctggatggaatctgcacgtgagtttgtgtgccttgcaaacaaaccttccctgagcacctgcactgtgtctggtcttgtgctgggcggggtgcccaggggaggagcccttagctcaccacagtgatcaagacatccctggccctgccctcacaggctcacagtccactgagggagacagacctatccccagccagggacccccagagtgtgccgggctcaggtgggggagcccagagggggaacctgacccagccagggaaggcagaggggacttcctggaggaggggatggtacagttaatcctaaaaggtctttcccaatgtaacagttgctctgtaggatggatgcagtggctcatgcctgtaatcccagcactttggaaggcaggaggatcacttgagcccaagagttggagaccagcctgggcaacatagtaataccctgtttctattaccaaaaaaatacaaaaattagctggacatggtaacacaagcctatagtcccagctacttgggaggctgaagtggaaggattgcttgagcccaggcggttgaggtttgaatgagctatgattgcgcccactgcattcccggctgggcaacagagcgagaccctgtcaaaaacaaaacaaacaaacaaaaaaaacgttggtctcctgtatgaccaatggataaagtaaccttgaccagtctaataactcccaggctgacctgtaatccaagccttctctgtatgtctgagcaggcaaagcccagctccagggctacctcaacccccaggctgatcagaagcttgggtaacctctcccagtgtggccagcgaccccccaccctcccacgttctgaccactgtcctgggcaactagtgacatctagtgggggattttgtcccagtctgacctggcctgtaggggccttgggcagtcggacctgtgacccacgcttcctagcagtggctggactcctcccccttcccgcaggtgccctggcctcttcccctgccctcctcacctgctctggccagtctgactcctcccttccccacaaggttgggagggaatgaaggagagagcgggaaggaggaagggagggtggcattcctgggattccctggatagggggaagagtgggagggccttccatgggtgagcaagcagagagggcaccccgtaccccacccccagccccatcatcgaagcggcctaggaggacctggatttgaagaccattgaaaataagagattaaaccggttgattccaggctactggtcagacgaggaaagcagcccagagcactgaccacaggggaaaacatctccgggcatactgggagcagctgctgggggccactggtcaggctgcgggggtcactggttggactgggagaggccagtgcaggccactcggacggcacgcttggggccattagttacactgggagaggccatcgcaggccacaggttgcagtggggtcctctggttaaaatcgacgatgccagcccaggctgctggtcacagtggggacgagtccccaaggcccctggtcagaataacgaggagaaggtccgcgattgcctggtgagatcccagctcgggtcactggctacgctggtcgatcaggccccccgctgcaggcgctggtcagtaagcccggacagctctaggcttgggggcggacgagccccgagcctggccccgtgcactgggaggtccgctccgggcagtgggaggtcctggccccgcgcccgggcatcgggggacgaggggggcctggagggcggggcggggcggggctgccgggggcggggcctctggctcccagccccgcagcggccgagctgcagcccgggctcagtctccgccgccgccgtgaacatggagcccccggacgcaccggcccaggcgcgcggggccccgcggctgctgttgctcgcagtcctgctggcggcgcacccaggtatggctcgggctgagggcaaggtgggactggggagaggcccctggggaccccgggaaagcgaggagaaagggctttaccctgaccccaggaagcaaaatgtggggaccccaaggaggagggatatgggagtgttggaaggtacgccttccagtgagagagatctggggacagccaggcaggagagctggggatacccaggcggtggatcagagacaaccagagaagtcagcccccttcccactcagcaccctggaatctgggtcccacctgcctcctccctcagaccctggaatctgggcccccagcccctctttcctcagacccaggagtccaggcctccagtggctagaatagcttcccccagggcacagaggatcaaaaccccagggctctctccctcaaaggtcctcaagttttgagaggtccagggaccccttagagaagcgaggaccatgtgtccccacaccagcgatccacatgtatttaggagtttccagagtccagtataaagaacccgcctccctcaggaaagggctggagcaccagccccgggcagtgacagtggaacaaagtgtttccaagtgacaggcccccttcctggggcctcagctacatttacacacctgcatgaggatagaaggagaggaggccgggggctggggggtgggggtgggggtgctggggacagagggacagagagatgagagagattggggaagagagaggaactctctgcctccacttgtctgcagatcagacccagccttaggcaccagcctggaccccgtcacccctccctggggacaggctggggccagaggtgagcgcttgggaatccaggcccctggcacactcatggtcaacagtgggtccccaggggtagggctgggccagattgagcagagaagggaagggagtttctaagaagcactgagagctgatgccaggatgccagcccagagggtgagggagggtggtggtttttctacaataactactccaccaggccccagcctcctcttccctctgatcccaggagtccaggtgcccagcttcccaagatcctgggcctcaaccttatccttttgcaagatgactcgacttatcccgtttgctgttgtatcaaactgaggggggccaagaggcggctgggggctctggctccaggccgggcaggtctcagccagcctgtccctcccacattcctgaaacctgcccagccctgtcccccctcaccgcccccacacatccatcccgcctaagctccgggcccagccgcagcccacaccccagcccctcactcatgggagagcggaagagacccagggactgagtggtgcaggtgcagagagaggcagagacagggacagagatggagacccaagaggagagacacacgcaaaggtggagaccaggatggagagaaacatttatccatcatcacagaggtggccctgcccagggtgctggaggcaaatggctgagccaggcctggccctgccctggggggtggcgtgtgctctgttgggataagcaaaggctggtgcagtattaccccaggagtgttcagcggaggccacagggccctgtgcagcccagaggaggagccctgagctctgcaagtgcagggagagatggatttgagacccagagatgcagggagaagggatggagggcgaaaggatctcagggaggaggggctggggcctagactcctgggtctgagggaggaggggctggggcctggactcctgggtctgagggaggaggggctggggcctagactcctgggtctgagggaggaggggctggggcctagactcctgagtctgagggaggaggggacaggggcccagattcctgggtctgagggaggaggggctggcacctggactcctgggtctgagggaggaggggctgggacctggacgcttgtgtcctgggggagaggggaccctgtctggagggctcttcctgttggtgtggtggatgatagctcagttgctctcttgcagatgcccaggcggaggtgcgcttgtctgtacccccgctggtggaggtgatgcgaggaaagtctgtcattctggactgcacccctacgggaacccacgaccattatatgctggaatggttccttgtgagtgcttggggctggggggcctggagtcagggcacagcagggcagcaaaggttcattctctcatcagtgcctaaggcctgtagagatccaccaagccacactccttgttacagatggggtcactgagtcccactgaggggaagggatctgcaaggtgccccgtgtctaggcacagccaagtctagaatgacattgacctgctctggactgcggg[222 bp omitted]gaggcaggagaatcgcttgaacctgggaggtagaggttgcagtgagccgagatcgagccaatgctctccagccaggcgacagagcaagactctatctcaaaaaaaaagaggaaagaaaatgagagacaatcgggagagggagagaccaagaggagaagggatgggaccggaatgagatggagaaaaggagacaggaaaaatcaagaactgatagggaatgggggcaggagaaggtggggagggacagagggaccagggagacccataacaagaggaaaagaggcagagccaggagctgcagagagaaaggacccagagagagagagactgaggagcgctgggacacccggagctgagagcctgccccgcgcccacagaccgaccgctcgggagctcgcccccgcctagcctcggctgagatgcagggctctgagctccaggtcacaatgcacgacacccggggccgcagtcccccataccagctggactcccaggggcgcctggtgctggctgaggcccaggtgggcgacgagcgagactacgtgtgcgtggtgagggcaggggcggcaggcactgctgaggccactgcgcggctcaacgtgtttggtaagtgtcctcgggcatcccccgaagggaggcaggcagggaggggcgcagggcaggggctcctgacgtgaacgtctttttcacagcaaagccagaggccactgaggtctcccccaacaaagggacactgtctgtgatggaggactctgcccaggaggtacctctcgggtggaccttggccccagggtcctggaggaggaggggacagggccctggactcctgggtctgagggaggaggggctggggacccctgggtaataaaggaggaggggtaaggccaggcgaggtggctcatgcctgtaatcccagcattttgggaggcagaggcaggcggatcacctgaggtcaggagttccagaccagcctggccaacataatgaaaccccgtctctactaaagatacaaaaattagctgggtgtgttggtgtgcaactgtaatcccagctgctcgggaggctgagacaggagaatcactcgaacccagaaggcagaggctacagtgagctaagatcacaccactgcactccagcctgggccacagagcaatactccgtctcaaaaaaaaaaaaaaaaagaagaagaaaagaaaaaagaaaggaagggcagagggggaagactcctgtgtcctaggaaggagagagctgggggacccagaatccttggtccctggaggatggtgctggaggcctggactctttagtctgagtcggggactaggaatttggactcctgggtcctgggagagtcgggagttaggagcccggctcatgagtctgagtggggagaactcctgagagaggagccccgacttcagagtcccagctccaagcccagggccatgcccgtgtctgcctcagatcgccacctgcaacagccggaacgggaacccggcccccaagatcacgtggtatcgcaacgggcagcgcctggaggtgcccgtagagatgaacccaggtgagcagcgcaggagcgcggcgggacgtgggctggggtgggtggcggggctatggcctggctgactgccacctcccccgatctctcccagagggctacatgaccagccgcacggtccgggaggcctcgggcctgctctccctcaccagcaccctctacctgcggctccgcaaggatgaccgagacgccagcttccactgcgccgcccactacagcctgcccgagggccgccacggccgcctggacagccccaccttccacctcaccctgcactgtgagtctgtgctggcctttgacctctgacctcaggctccacacctcatgaggcctgaccctccacccgggggcttcacactcccctctgaccctctgcctccctacttcatgctaaaaaaaaatgtgctagtgctggccactgacctctgacctcaattggtcgcacaagccccatcctgacctctgacctccgacctccacttagcaccctggaccccatgaagtttatgactaaatggtgctttccaccttctcacactgaattgggtccccccatgacatctggctccaagtctcacactgacccatcgcccatacggacctctgactcttgacctatactcttagtttatttcaacctctgaactctggcactcagaataattgtgaacctgaggcttgaaacctatgacccgtaacctttgacccgccatagccctcacctgggatgcagggctgacctctcgcctgtcctctagccttgacccttcccctgatcacaattcccatctccctgcccttcccttagatcccacggagcacgtgcagttctgggtgggcagcccgtccaccccagcaggctgggtacgcgagggtgacactgtccagctgctctgccggggggacggcagccccagcccggagtatacgcttttccgccttcaggtgacccacccaagggtccctctgggatccaccccccagcccctgacctctgtgacctgctaacctgcataacttctaatgtgggacctgggagtccccatggcttaggcagccacctgatctggtggcccacgaactaaaaggacctctgacccctgatttgagagagtcaggacttagcatgccacctgacttgatggcccctgacccctgattctggcttagcatgacactaacctggtggcttctgacctagcatgagcccgctgaaccggggtggcttctgagcctggttcctcgtcccccgtctcccaggatgagcaggaggaagtgctgaatgtgaatctcgaggggaacttgaccctggagggagtgacccggggccagagcgggacctatggctgcagagtggaggattacgacgcggcagatgacgtgcagctctccaagacgctggagctgcgcgtggcctgtgagagccctgggtgaacgggcgggcaggaggggccctggcatcagtgcctctgcgccctcctccctacagccctgaagttgctctgtcatcccaaacactctgccttcaaccctttctctgcatttcttgggggtttttttggttgtttttttttttttttttttcccagagacaggacctggctacgttgcccaggctggtctcgaactcctcatgcgatcctcctgccttgctctcccaaagtgctgggattacaggagtgagccaccgcatcttgtcgagagctctttccatagcacagacctgaccctcctctgctcagaatctgccatggctccccagtacccttgggagaagcccaggtgtctcaccatggccttcaaggtccacctggccagttccaccattagctagctgatccttctccccagtcaaggctatctcctcatcaccccccaggctcctctggttcctaccttcactgcccatccttcctaccgtctatttctcaccaatcccttgaatcccaggcttctaagaatgattttcagttcattcgcatccaggccctggggaaaggctgtattctcccttggcacttcttacatatcccttcctggggtagaccctgcgccagatgctggggacacatctgtgaacaagacagaccacccctgttatttcagtaggggagacagatggtaaatgctaactaagccctttcgtaacagtagtgtatctacaggtgatatcaccagtgagagagagcaggagaggggattattttaggtggcaggtgttgcagtctgctttcctgagaagcagattctgacttggatgttttcaggcaagaagtttatgggaagtaccctgggttccgcacctcttgggtctagggaggtaaaggaagcaagatttggcaaggtgagaagttggactgaagtctaaggaaggtctcaggctgggtgcagtggttcatgcctataatcccagcactttgagaggctgaggcaggaggattgtatgagcctaggagtttgaggccagcctgggcaacagagggagaccccatttgcacacacacacacacaaattaaaaattagccaggcatagtggcacacacctgtagtcccagctactcggaggcccaggtgggaggatcccttgagtctggaaggttgaaactgcagtgagccaagattgtgccactgcactccagcctgagcgacagagaaagaccccgtctcaggaaaaataaaaataaaaaagtaggccgggccccgtggctcatgcctgtaatcccaacactttgggaggccgaggtgggtggatcacctgaggtcaggagttagagaccagcctggccaacatagtgaaaccccctctgtactaaaagttagccgggtgtggtggcatgcacctgtaatcccagccactcaggagcctgaggcaggagaatcgcttgaacccaggaagcggagattgcagtgaactgagatcgtgccattgcactccagcctgggcaacagagtgagactccatctcagaaacaaataaaagaaagaaagagggcctcagtcagccccacggggtacttggaatccaggatggcccttcacagttgtccccagttggggtgagggggctgggccttaataacctctacatcaaccagtcctcagaggtgtgctggccttaggcaaggggctctcagcagctgaggcagctcccagagaggggtgacagctgcaggctgacagctgtcatccttcttagcagctggtggaataagtccttccgtgctgtaggaaagatctgggtgtccacaataggggaggtcagggaagcctctgagaagagaca[132 bp omitted]gaaaccccatctctactaaaaatataaaaattagccaggcatgatggctggtgcctgtaatcccagctacccaggagactgaggcaggagaatcgcttgatcctgggaggcggaggttgcagtgagctgagatcgtgccactgaactccagcctgggtgacagagcaagagtctgtctcaaagaaaaaagaaattggccgggcacggtggctcacacctgtaatcccagcacttttgggaggcagaggcgggcagatcatgaggtcaggagtttgagaccatcctggctaacacggtgaaatcccgtctctactaaaaatacaaaaaattagctgggcgtggtggcaggtgcctgtagtcccaggtactcgggaggctgaggcaggagaatggcatgaacccaggaggcagagcttgcagtgagctgagatcccgccactgcactctagcctgggcgacagagccaaactctctcaaaaaaaaataataagaagaagaaatgcagagagctacaaaaagagcactgcaagtagagtgagcaagtgcaaaggccctgaggcaggccccaacttggtctactcaagaaaaacagcaagagaacggggtagctgggagcacaggaggaatggggaagagtgggagatggttcaagaggtgggtgagggccagaccaggcagcatcttttaggcaccctcaagaagtttggcctcgatgccaagggtactggggagccactgcagggttttatgcagaggggagggatgaccagtgggtggttggttttttttgtttttttttttttgagtcagagtctcactctgtcacccaggctggagcgcagtggcacaatctcggctcactgcaacctccacctcccaggttcaagcgattctcctgcctcagcctcccaagtagctgggactataggcatgcaccactatgcccagctagcttttggatttttagtagagatggggtttcaccatgtgaccagggtggtctcgaactcctgacatcaggtgatgcacccgcctcggcctcccaaagtgctggggttataggcatgagccaccgtgcccggcctgaccagtggatgttttaaagaggtccctctagctgctcagtggaggatggacaagagggaggagcaggctagtgaagaggtggttgggacagtcaaacctggggccagaggtggcaggaagccagaggatttgtcctgggagcagaccagataaagacttgctgaggccaggagcaggggctcacgcctgtgatcctagcacttttgggaggtcaagacaggaggatcacttgaggccaggagtttgagacccagcctggccaacatagcaacaccttgtctctattcaaaaacaaaactttgcagaaaagatgtttgggggtaacagggaggttaccccacaggttggggtttgagcaaaaggtttgtgtgctaaagtcacagaagggacaccttccacacctaaggttattcattaaccttgggctcagatgtcagctctgaagaaaagtaattgacttgggcatgtcaatgttggggttagactgctagatttttggttggagagcctggatgggagaatggagatttcatggagatggggtaaaccaggaggattacttgctgttctctgcttccaactgtccattcatgtttgcacccccgaccgcccctggagagcccctaattgagtgggtggcggtctgggacgagtgacagactgtcccccactgcagatctggaccccctggagctcagcgaggggaaggtgctttccttacctctaaacagcagtgcagtcgtgaactgctccgtgcacggcctgcccacccctgccctacgctggaccaaggtgagagggagaggagccccctcgggccctgcactcgcaccctcctctctcccctcactcctcgccctctcacagcgtcctcctcctcctctgcccttcccaggactccactcccctgggcgatggccccatgctgtcgctcagttctatcaccttcgattccaatggcacctacgtatgtgaggcctccctgcccacagtcccggtcctcagccgcacccagaacttcacgctgctggtccaaggttcagggggcagggagggggtgggcttggatggggacagtgtggggtgtgggacctggacaaacaggacgagttcctgagtccctggctggggactccatcttctgctcgatgcctctcttctctctctctctcctctcccttcactttcttcccatccccaccacccacaggctcgccagagctaaagacagcggaaatagagcccaaggcagatggcagctggagggaaggagacgaagtcacactcatctgctctgcccgcggccatccagaccccaaactcagctggagccaattggggggcagcgtaagggaccttcctctccaccctgagccccctctcactcatccaagtatcacaccctcctttccacttcctgggagactggacgtcgttcacctctgcccttgaccccaccccttgaccccaccagccggggcctgatcggagcctccatagcccgcagagccaatccccggacggcagggttgggtgagcagctctctgaccctgaaagtgaccagcgccctgagccgcgatggcatctcctgtgaagcctccaacccccacgggaacaagcgccatgtcttccacttcggcaccggtgagtgactgaggtggtggcagaggagccgggtgtggggcagacagagcccactgcctgacccacgcctctctccatcctgtccctgcagtgagcccccagacctcccaggctggagtggccgtcatggccgtggccgtcagcgtgggcctcctgctcctcgtcgttgctgtcttctactgcgtgagacgcaaagggggcccctgctgccgccagcggcgggagaagggggctccgtgagtggcctgctatctgcaatgaccaccatagcttaaccccatccccaccctcaaccccaagctcaacccataacctcaaccacatcttatcctccaccccacatcccaccacatccacctccatccccaacccatcctcatccccaactacagccccaaacccagccccagactaatccacagccatccccaactcatcctcatccccaactgcagccccaaacccaacccagggccatccccaaacccatccccaagccaaactcaacaccatccccttccctaatcacctctcctgcccctagctcagcctcatccccaactccatgcctgtctccaatcccaaccctgcccccaatctcccctcaactccaatccataacccccttcaaaccatcctcaactaagctcctctccagccctggccacatccccatcctcccccaacctccagccccaacacccatcatccccctgagctcacccttaactccaatttatcctccaagcctatctctcaccatccagccctcacctagccatttcccaaccctagtcctccaccgtcccgaagccaacttcacccatgtccccatccccaatcttgtccccattcctgactccaaatccaacccctaagcctccccaagctcctcctcatctaaccttgtctccagccccaaccacatggccgtcctcacctccaatccgtaaccatcccagaccgatcccaaagccaactccagctacattcccacctccaaccccaatagcatctgcatccccatgcccaaccctaaccccagtgccattaccagcccctaccccatccctatgccatccccacccagcacacccccatcctcacctccatccccagccgcatcctagtcccacccacccccatcctcagttcctccccctgccgtgtgcacctccaacacgacgcctccgcccgctgcctcctccccccaggccgccaggggagccagggctgagccactcggggtcggagcaaccagagcagaccggccttctcatgggaggtgcctccggaggagccaggggtggcagcgggggcttcggagacgaggtgggtgagggcctgggccccctggtgagagggacctgctgggcagtggagcacgcccgtgggcacaggctgacctctccatccgctccccagtgctgagccaagaacctcctagaggctgtccctggacctggagctgcaggcatcagagaaccagccctgctcacgccatgcccgcccccgccttccctcttccctcttccctctccctgcccagccctcccttccttcctctgccggcaaggcagggacccacagtggctgcctgcctccgggagggaaggagagggagggtgggtgggtgggagggggccttcctccagggaatgtgactctcccaggccccagaatagctcctggacccaagcccaaggcccagcctgggacaaggctccgagggtcggctggccggagctatttttacctcccgcctcccctgctggtccccccacctgacgtcttgctgcagagtctgacactggattcccccccctcaccccgcccctggtcccactcctgcccccgccctacctccgccccaccccatcatctgtggacactggagtctggaataaatgctgtttgtcacatcaacaccatcctgtggccagagcttcctctgggagtagggaggggaagggcgatgcaggtgattccctgctctcagctgcccccccatccgcccccttgcaagacctcagaagacgcctgatgtcatggagaaagaaatgagacagggctgggcgccgtggttcattcttgtaatcccagtggtggtggctcacgcccgtaatcccagcactttaagaggctgacactggagggtggcttcaggccaggagttcaagaccagcctgggcaacatatggagaccccatcgctacaaataataatactaataatacagaaattagccaggtgtgcctatagtcccagctattcaggaggctaaggtgggaggattccttgagcccaggaatacgaggttacagtgagctatgatcacgccattgcactccagcctgggtgacaaagcgagacttcatctctaaaaaaaaagaagaaaacaaaaagaggccaagctcagtggctcaaacctgtaatcccagcactttgggagaccaaggcagggggatcactttaggtcaggagtttgagaccagcctggccaacatggtgaaaccccatctctactaaaaatacaaaaaattagccaggcatggtggcgcgagcctgtaatcccagctacgtgggaaactgaggag[134 bp omitted]acgcagagggcgacttagctggccgggggtggacggaaagatgccaggtcccgagggtgctgggcttggcccccgaggaccagcgtctgcctggagatgggtgctgtccccttaagtaaaagttcccagtctgtcttgccagagccccagagggaattgaaactgggcgaggaaaagctccctcttagctgtagagtcaatagaattagggatggagccacctcctctggggaggagtccctggggaaagcggggagcttggaggaatccagagaaaagggggcctggggcagagaggacacacagacattacaaggccaagaaagagggacgtgagaaagggatggaaagatttagggggaggcaagagggatgggttgggaagctccgagagagccctggagtaagagacaaaaatagatctggggagacagacaaaaagagtagtgggccaggtccagtggctcatgcctataatcccagcactttgggaggctgaggcaggaggatctcttgaggccaggggtttgagaccagcctgatcaacataccaagaccccatctctacaaaaaataaaaaattagccgggcatggtggcacacgactgcagtcctcagcacaggcaagaggatcacttgaggccagcagttcaagaccagcctgggcaacatagtgagaccccatctctacaaaaaaataaaaaattagctgggcatggtggcaaacacctgtggtcctgcactttgtgtgaccaaggcaggtggttcacttgaggccagtagttcaagaccagcctgggcaacacagcaagaccacatctctacataattttttaaagagaaatacagagaaagaagaactggagttagagagatcattgcagttggaaagggagagaggaaatgcaagcagctgcctagaaggacggaggagggtagcgggaggtcagcacgggtgactggctggcgacctcacctctctgagcctttcttgtgcatcgaatggggatcaattgcactttggccacggcgggctgctgtgaggtgtcagtgtgatcttagagccatgtggggtgatgggggcattgcactcacacaccacccagggcctcctagcattgccttctcaaatctcaggcacgcagctccactctctgctctcagtcacctcagccacaaagtggacagagtgggatctgtcaccataggaaattattcggatgccacagaagcctccttcctggtaggtaaaccaagcagcctgcccaggcagaagagctcatgggccacgttaaggcgctcagatcccatggtttattgaattcatttaaaacaaacacaaggttattgtttgtttttcaactgtgtggtggtaggaagtgctcctgacggttttcccatggcaataatttactccttgatttcacccaccactactgtgacagctttctctcactgattcacccaaaagtgggcttttctttgtcattcattcttttttttttttttttttttgatggagtgcagtggcaaaatcatagctcactacctcaaactcctaggctcaagtgatcctcctgcctcagcttgctctgcagctagacccacaggcacatgccatcacacccagctaaatttttatttttattttttgtagagacaaggtctcaaactcctggcctcaagcaatcctcctgcacaaagttttaggattacaggtatgagccaccatacccagcctaaaaaaaaaatttttatttttttatttttttgagacagggtctcactctgtcacccaggctggagttcagtggcaagatctcggctcaccgcaacctccacttcccaggctcaagcgattctccagcctcagcctcctgagtagctgggtctacaggcataagccaccaactcctggctaatttatgaattttttgttgagacggggtttcaccatgttgcccaggctcgtcttgaacttgagctcaaaatgatctgcttgccttggcgtcctaaagtgctgggattacaggcctgagccactgagcccggcctctaaaaaactttgtattaacaactttcttcttccaaaaaacctgcagttcccactcttgtcaatgtgtgtgaggtgcccattactccatactttggccagcacttgcaattatcctctaaatttttgcctacttgatgggtaacaaaatggctctcatatttgtgtctctttttttttttttgagacggagtttcgctcctgttgcccaggctggagtgcaatggcacaatctcggctcactgcaatctctgcctccttggttcaagcaattctcctgcctcagcctcctgagtagctgggattacaggcacccgccactacgcccagctaattttttgtatttttagttgagacggggtttcaccatgttggccaggctggtcttgaactcctgacttcgtgattcacccacctcggcctctcaaagtgctgggattacaggtgtgagccactgtgcccggcctaatttttaggcggggtttcaccatattggtcagtctggtcttaaaactcccgacctcaggtgatccactcgcctcagcctccaaaagtgctgggattacaggtgtgagacaccgtgcctggccgataatttggtcttgaggtccctttcatgagcatggccatagactctggctttgccctgcctgggctccaggggattagatcataagtgtttacaatgtgcttttcagcagattttcctttatcctggcaggcagcccaatgcctaagtgtctgacttgtacacaggtgtccctctcacaggaaatgtatttatactggccaagaccctttgtggctcttatctgacctgtgtccagtttattccaaaccaggaaagtcattaggttcaggtgtgtcagtcaagtgacacacacaaaggaggcaactcaacaaaacacatgaaatatcagaaagaggcagggtgcagtggatcacgcatataatcctagctcttcaggaggccaaggcaggaggatcacttgatgccaggagtttgaggccaacctggccaacatggcgaaaccctgtctctactaaaaataaaaaaattagccgggcgtggtggtgtgcgcctgtagtcccagctactcaggaggctgaggcaggagaaccacttgaacccaggaggtggaggttgcagtgagccaagatcatgccactgcactccagcctgggcgacagagggagattctgtctcaaaaaaataaaggaagaagaaataacagaagcagaggctggacatgatggctcacacctgtaatcctagcactctgggaggccaaggcaggaggatcagttgaactcaggagttcgagaccagcctgtgcaacatagcgagaccctgtctctatttaaaaataaaaaaagaagaaagaaagatataacagaagcagtttattacttatggatcccagagagaaaagagcagcacacttccctgggccagtgggaagggggcagctgcctgagacatgcaggctcaaccagcaggtggagagagacccccccaaagcctttactgcggtccagggcatggcggagacggagttccccaggagagttctaactgatgggtttagaacaagcaggcacaagaattccatagagacacactgtgatggaggttgtcatatctgcacagtccattcattggaggtgtggggatcagtagcttgggtcaagtagtttgtatctatctagctgtcccatacagagatggtcccatacaggaggaggtgagataaagctgataccttgatcaactccagtaagaaactggaaggagagccgggcatgatggcttacacctgtaaacccagtgctttgagaggctaaggcaggaggattgcttgaggccaggattttgagaccagcctggacaacataatgagaccctgtctctaaaaaagaaatagagagaaggaagagaggcagggagggagggaggaaggactgggaggaagtatagagctggaaactgtgtcaaggataactaagtccagattttggcatgagaaagttaaacatattcagaatggatgctaagacaatatagaattatacaaattcaccacaatggcatattaatttgttttcatttgaatttccgtgacctctagtgtgaaaatggtgtttctctgtatgttcattggccatttgcttttcttgtttatgaactgtggtatactcttgcctacttttctctttttttttttaccttttcttattaatttgcaggatctctctacacaccaggaatattaacctctaatcttataaagcttttatctcaggctgggtgccgtgactcacgcctgtaatcctaccactttgggaggacgaggtgggtgaatcacttgagtccaggagttcaagaccagcctggccaacatagcgaaaccctgtctctactaaaaatacaaaaaaatagccaggcagggggtagccaggcatgcctgtaatcccagcactttgagagaccaaagcagacggatcgcttgagcccaggagttcaagaccagcctgaccaacatagtgaaaccctgtctctactaaaaatacaaaaaattagccgggcatggtggcgcatgcctgtgatcccagctactcaggaggctgaggcagcagggttgattgagcctgggagttcgaggctgcagtgagtcttgattgcaccactgcactccagtctgtgtgacagagtgagaccctgtctttacatagatatagacagatgatgatagatagatgatagatagatagatagatagatagatagatagatagatagatgatagatagatagatagacagatagatgatagatagacagacagatatccacatagatacctcaaacctattatgtcccaaatcgacctccagtctttcctctcgcataaatggtatccctgccctccagctgggtgagcccaaaacttagaatttatcctggattcctccatttcctttacctcccactcacataacccaaaggcacatcccatgggtcccctcccatacagctctctttcctgaccacttatcccccggcttcccatattcaataaaccttttaactctataccctgccacagggcatagagctgcagctagctctttctacaaatggtttcacggccatcagtccaaacatacatcttctttcacctggatcaatgcacttataaaagcaaatgctcaacagcaatctttgatggctctaatactcacatcaattaaaaatttaaacgttacctttcagtcacccttcccatccttttaaagtggaattcctaaatctaaaatggtaaaagttaaaaaaaaaataaaacaccaagctcatatggctctataa[133 bp omitted]cggtgaaactccgtctctactaaaaatacaaaaaattagccgggcgtggtggcgggcgcctgtagtcccagatactcgggaggctgaggca[137 bp omitted]tcaattctctttatttatttatttattttttgagacggagtctcgctctgtcgccaggctggagtgcagtggcgagatctcggctcactgcaacctccacctcccgggttcaagcgattctcctgcctcagcctcctgagttactgggactacaggcacatgccatcacgcccagctaatttttttatttttagtagagacggggttccaccatgttggccggaattgtctcaaactcccgagctcaggtgattggcccacctcggccacccaaagtgccgggattacaggtgtgagccactgcgcccggccaattttttttttttttttttttttttttttttttttttttgagatggagtcttgctctgtcgcccaggccggagtgcagtggcgcaatcttggctcactgcaacctccacctcccgggttcaagcgattctcctgcctcagcctccagagtagctagattactggcgcatgccaccatgcccagttaattttagtagagacagagtttcaccg[137 bp omitted]gctgacccattgctctcatgtatgtttgtttgtttgtttgtttttgagacaggacctggctctgtcgccgaggctagagtacaatggtgcaatcatgacttactgcagcctcgaccttgggctcaagtgatcctcccacctcagattccccagtagctgggactacaggtgcattgccctcaggcccagctaatttttgtattttttgtagagatgggatttcactaagttggcaaggctggtctcaaactcctgacctcaggtgatctgcccgcctcagcctcccaaagtgctgggattatggacatgagccaccatgccctgcctataactgcttttaaacataattttatacttttccaggagcgtcctaatgcatacgtgtactgcgtattctc[133 bp omitted]gaaaccccgtttctactaaaaatacaaaaaattacccaggtgtggtggtgcgcacctataatcccagctacttgggaggctgaggcaggagaatcgcttgaacccagggggcagaagttgcggtgagcagagatcgcaccattgtactctggcttgggcaacaagagtgaaactccgtctcaaaaataaataaataaataaataaataaataaatagcagattagaaacccgtctgtgactcaggttttctcatttctcttagaataaaattcaaactcctacaaaaggctgcgtgcatagtgcctctctctctgccatccctagcttcactttccttgcctgcatcctatcagacagtctgtctctccagcccttgaatattttgtttctttcctacctctttttttctttttttgagacagggtctcgctctgtcacccaggctggagtgcagtggtgtgatcatagctcactgcagcctcaaaccctggggctcaagcaggtcctcccacctcggcctcctcagtagctgcaactacaggcatgcaccaccacagctggctaattaaaaaaaaaaaaaaaaacttttacagatggggtttctctgtgttgactagtctggtcttgaactcctggcttcaagagatcctcctgcctcagcctcccaaagctctgggattacaggcatgacccatcacacctgaccaggactctcaaacttacccttcatttgtcctgaaatctttcactacagatcctcacgtaattcattcattctcatactgcagattttggctcaaaatagcacctagccagaaatgtctttcagactctcttattttaaggagctcttgccccaaacccacccaagttacttccatcatcctaagtattaatacttttgcttgattttgttcttttctagtttctgggttctatgcatagaccatttttactaatattcatattttcttttaaataccttagaaagatattttagatttcttcatttgagccatgcacattctttgaaaatttatcctaaaatagctgggcacccagcccatcccttgaacccaggaggtggaagtggtagtgagctgcgattgtgtcgctgaactccagcctgggacaccgagtgagactccatctcaaaaacaaacaaacaaacaaaaaaatgttgggcacagtagttcatgcctagtcccagctactcaggaggctgaggcacgaggatcacttgaggccaggagtttgagatcagcctgggcaacacagcaagacctcactctaaaaaaaaatgttaatgctaacatataactttggttctgtttgtgattggcatatggtttatattatactttttttttttatttgagatggagtctcaccctgtcgcccaggctggagtgcagtggtgtgatcttggctcactgcaacctccatctaccatgttcaagcgattctcctgcctcagcctccagagtagctgggattacaggcatacaccaccacacccagctaatttttgtattttttttagtagagacagggtttcaccatgttgatcaggctggtctcaaactcctgacctcgtgatccgcccgccttggcctcccaaagtcctaggattacaggagtgagccaccgcgcccagcaaaaagttttttaactagctgagtatagtggcacgagcctgtagtgccagctactcaggaggctgtggcgggaagagggaggctgcagtgagatatgatcgcaccactgtactccaacctaggtgacagcaagaacttgtctcaaaaaaaacaaataacttcggccgggcaaggtggctcacacctgtaatcccagcactttgggaggcagagtcgggtggatcccctgagaccagcagttcaagaccagcctgaccaacactgtgaaaccccgtctctactaaaaatacaaacaattagccaggcgtggtggccggtgcctgtaacctcagttactcgggagactgtgacagaaagatgaaggctgcagagagctgtgatcgcacccctgtactccaacctagatgacagcaagaacctgtctcaaaaaaatagacaaatacataaaataaaatcggagtgaagctaccaatgtaatgttgagtgagtgatatgtttcagaaaatactttctagatccttgatgtttaatacggtatccctagtcatatgtggctatagaaacgtaaactacttaaaactaaataaaatgtagaatctcattcttcagtgacaatagccacagttctactgctcaacagacaattgtggcttgtggttactatattggacagcacagatataaaacatttccatcaatatagaaatttcttttttattctttttttttttttttttttttttgagacggagtcttgctctgtcacccaggctggagtgcagtggggcgatctcggctcactgcaagcttcacctcccaggttcacgccattcttctgcct[175 bp omitted]cccggcccccagtacagaaatttctacagggtaatgcagatctagaatatgatcccattttaaaataaagtccatggccaggcatgttggctgatgcctgtaatcccagcactttgggaggccaatgcaggtggatcacctgaggttaggagttcgagacaagcctggccaacatggtgaaaccccgtctctactaaatctacaaaagttagcttggcatggtgtcgggcacctgtagtcccagctactcaggaggctgaggtgggagaatcacttgaacccaggaggcagaggttgcagtgagctgagatcgcaccattgcactccagcctgggcaacaagagcaaaactctgtctcaataaataaataaataaaataaaataaagtacgtatgtcacatgtgcgtttacatgtgtatatataaatatatttaacaggtttttaatctgttatgtgaattttttaaattttttcatacagtgtcactttattaagtgggtagaaaatg[133 bp omitted]ctcctgcctca[133 bp omitted]caatctgccaaagtgctgagattataggcgtgagccaccacacctgagacacggtttcttaaaacaaaagaaaaaaagagacagggtttcactctgtcacccaggctggagtaaagtagcataatcacggttcactgtagcctcaacatcccagggctcaggtgatcctcccatctcagcctcctgagtagctgggattacaggagcatgccaccacacctggctaatttttgtactttttgtagagatagggtttcaccatgttgcccaggctggtcttgaactcctgggctcaggcaatgcgactgcctcggcctcctcccaaagtgctaggattacaggcatgagtcaccacacctggcataaattattaaatatttaaaattgccaagttccttggagaaactctatttgactacattgtttattttttttaatatgctgcttcataacatctatttatttaaaaatttcttaacatatgatgcagcaactccccttctgggtatatatcagaaagaattgggtcgggcgtggtggctcacgcctgtaatccaagcactttgggaggctaaggcaggaggatcacctgaggtcaggagttcgagaccagccttgccaacatggtgaaaccccatctctactaaaaatacaaaaattagccaggtgtagtggcacacgcctgtaatcccagctactagagaggctgaggcagtagaatcacttgaacccaggaggcggcggttgcagtgagccaagatcacgccattgcactccagcctgggggatagagccagactctgtctcaaaaagaagaaagaaaaggaaggagggagggagggggggaaggaaaggaggaagggagagagggagggaggaggaaggaaaggaggaaggcaggaagggaggaagggagggaggaaggaggaagaaaaggaggaagggaaggaagggaattagaggcgtgagccacagcgcccagcttacattatactttctaacctactaatggcatcaaataaataggaaccggtatttgagaagcacatattataattggaggctgcagtggctcatgcctgtaatcccggcactttgggagacagaggtgggcagatcgcctgagcccaggagttcaagaccagccagggcaatgtggcaaaaccccatctctacaaaaaatccaaaagaattagccaggtgtggtggtatgagcctgtagtcccagctactccggagggtgagatgggaggatcacctagtcacaggaaggtggagactgcagtgagccgtgatctggccagtgcactccagcctgagccacagagggaaggacggaagggaaggaaaagggaacagtgacaaacagagaccagaaacacagagggatgctgaagcataaggaacgaaagacccagagatacagaaatttaggaacacgaagagacccaaagatagtgacagaaacagagagacagaggaaagtctagaaagaaacaatgcagtgacacccagcaccttcatgtatttatttatttacttatttatttattcattcattcatttatttattttttgagttggagtcttgctctgttgcccaggctggagtgcaatggcacgatctcagctcactgcaacctccacctcctggattctcctgtctcagcctcctgagtagctgggattacaggtgtgcaccaccatgcttggctaatttttgtatttttagtagagacaaggtttcaccatgttggccaggctggtgtcaaactcccgaccccaggtgatctgcccacctcggcctcccaaagtgctgggatcacaggcatgagccacctcgcccagccttatttatttatttagagacaaggtctcgctctgtcatccaggctgtagtgcagtggtgcaatcactgctcactgcaaccttaacctcccagggctaagtagtccttctgcctcagcctcccgagtagctgggaccacaggcatgtgccaccacgccaggctaattttttatttttgtagagatgggatctcactatgtttcccaggctggtcttgaattcctgagctcaagccatccttctgccttggcctcccaaagtgttaggattacaggcatgagacaccacgcccgacctcccacatctctctttttttttttttttttttttg[134 bp omitted]ccacgcctggctaattttttatatttttagta[143 bp omitted]tatgtacatatatacacgcatatatatttatatatgtataaataaatacatacatatatatgtgtatatacacgcgcacacacacacacatatatatagaagcttttactttaaagctttgattattgctaagtttattttcattgtctcaagatctgtttaaccctggagccagactgggtcagtgggtctgtgtggtgcctcatgtacctgtctctgccccttgaagttctgtttaccacctccaagaggcatagcctgcagtctcagcaaaaggatagattcccaggaagagtgcgagagaggtttggggcccaggtgggcagcccacccagctgaccccaccaggtgggcatgatatcatgatatcaaatatgctaaatttgtgtctgtgtacatcatgttctggccccagggaaatgagcactttgctggtgaggttggtgacattttgtttaccatctatgcctgaggaggaaagactggaggaaagaaagacctaagaggccagtttatattcacaaacatggaagtcaagcctgttccacctttccaatgcaatagagcacctactgggaaagccatgcctggccagcccctggcaaaacacacctgaggattcattcctccattcacgcaatcataccttcaagaaaagttcagagggcgtggtggctcgcgcctgtaatcccaacagtttgggaagccaaggctggctgatcacctgaggtcaagagttcgagaccagcctggctaacatggtgaaaccccatctctactaaaaatacaaaaattagcctggcattgtggtgcatgcctgtagtcacagctactcgggaggctgaggcaggagaatcacttgaaacttggaggcggaggttgcagtgagctgagatcgagtcactacactccagcctgggtaacagagcgagactccgtctcaaaaaaataaaaagtgtattgagtgtttactgtgtgc[134 bp omitted]aacacagcaagatcccatctctacaaaaaaatttttaaattagccaaacatggtggcacacacctgcagtccccactactcagagtgggaggatcgctcaagtccagaaagtcaaagctgcagcgagctatgatggcattactgtactccaggctgggagacagagcaagatcctgtctccaagacataataataataataataattcacatcctaatggtgttgctggactccagtggggaaagtggtcagtggaattccttagaaggtccacagacctaggaagagacttcaggaactgcaaccaatccctgactctctagggcctgaggaggcacttggatgggaacaccctccacctcccaagagaagcagttgactcctccacgaggaagcactggacagccaggaggtgcctcttgttaaccaaagtgggctgttgaccttgaactccagctcagagatcttgtccctggtcttgttctcaagactcatcaggttctctctttctctggacatggaatctagatcttcaattttgaagccaaatctatgggagtaaaacaaagagatttgattaaaacaaaagatgttgtgcaaaactcaaaaaataaaacaggctgggcgctgtggctcaggcctgtaatcccagcactttggaaggccaaggcaggaggatcacttgagcccaggagttcgagaccagccctggcaacaaacagagactctgtctctacaaaaaatgcaaaaattagcctgatgtggcggtacacgcctgtagtcccagctactcgggaggctgaggtagggggatcccttgagcctgggaggctgaggctgcagtgagccgtgatccagccactgcattccagccagggcaacagagcgagatcctgtctcaaaaaataaaataacagtagtcccagcactttgggaggtcgaggcaagcagatcacttgaggtcaggagttctcaaccagcctggccaacatggtgaaaccccatctctactaaaaatacaaaaattagccaggggtaggggggcacacctgtaatgctagctactggggatgctgaggcatgagaatcacttgaacccgggaggcggagtttgcagtgagccaagatcacgccactgcactccagcctgggcaacagggcgagactccgtctcaaaacaacaacaaaaataaacatgagaagctagatgactgtagctggctgatcacctgcttggcagccacagcttttacctgtgtcttgggcttgggactcatggagcagagtgggtgtcgcccacaggacgcatgaatgcttggagcttactggatccctgcatccctcccatctgtgttcagctcacattcttagtatgtctaacaggtctcatgagttgctttttttttttttttgagacggagtcttgctcagttgcccaggctggagtgcagtggcgcgatctcagctcactgcaacctccgcctcccgggttcaactgattctcctgcctcagccttccgagtagctgggattaccggcgggtgccaccacgcctggctaattttttgtatttttagtagagacaagatttcaccgtgttcgccaggatggtctcgatctcctgacctcatgatccgcctgcctcagcctcccaaagtgctgggattacaggtgtgagccaccacgcccggcttgagttgcttcttaatatccatccttcatttcacctgtctgtgtccttatttatagggctcttgttccctatataacagaattgaaaattccctttaaaaaaatacagcaaatgcacacagaggatcagaggatggaggggagaatttgatgagataaccagggaagtatttagtacaaagcctggcacagagtccatgtgcagtacatgttaattattgtgattatctaaggaaaaataaagag[132 bp omitted]gaaaccttgtctctacaaaaaaaaaaagacaaaaattagctgggcatggtggcacgcgcctgtaatcccagctactcaggaggctgagacacaaggatcacttgaacccaggaggcggaggtggcagcgagccgagatcacaccactgcac[134 bp omitted]ccagcctggcaaacatgatttagtagaaaccccgtctctactaaaaatacaaaaattagctgggcgtggtggcaggcacctgtaatcccagctactcgggaggctcaggcaggagaatcgcttgaacccgggaggcggaggttgcagtgagccgagatcacaccattgtacgctagcctggggggacaagagcgagacttcgtctcaaaaataaataaataaataaacaaataggctgg[138 bp omitted]tggcagacgcctgtagtcccagctactcgggaggctgaggcaggagaatggcgtgaacccgggaggcggagcttgcagtgagccgagatcgcgccactgcactctagcctgggcaacagagcgagactccatctcaaaagtaaaataaaatataataaaataaaataaataaaatacaaacactcccttagtccagggcagggaccagatacagagataccactctaaaggcagacattggtgttggggtttggtgagttggatggcgagtgaacagatggctagtgggaagggaaagagaagaggaaagggttctccatccagtacctggtccccaagttaatgagtggaggatcccagcctgccccaccaggagggaatacatttgcataaggtccctcatctgcatggcatcccagggaatttgcatagagatggcagcctggggccacatcagtatgacccctcctcccaagggttgaaactccagcctacattacaaaggcctagggcaataggaaagtgggaggggtgaacctcaggatctggggctccaggaagtaaagagaagttggtagtaaactacccttgctctttaaccttctgtggttcccagagcatgagccgcccttcagctggcattctggaccttctaagatactgaccctcacatcccctgctcccgctgtcaccaccctcctacctggaatgcccttccccatatcccgtgctgtgacaaagcttgcctattcttcaaagcctggacatcctgaagaattctgaaagctttcaccaccagcccctccttgccctgcccttggaaatttacaaagctctgtgcatctcccagacatgtacagattttttggggtatatagtttattagtaaggttatatttgattgcaaatgactatatatatatatatatatatatatatatatatatatatatatacacacacacacacacacacacacacacacacacatagtctcatacatatatatatatatatagtctatacatatatatatagtctcatatatatatatatgtataccaggagtcatgtctcatgcttgtaatcccagcagtttgggaggccaaggcaggaaaattgcttgagcctaggagttcaagaccagcctgagcaacctagtgagagcctgtctctacaaaaaagtcaaaagatgagtctggcaggccgagcacggtggctcacgactgtaatcccagcactttgggaggcagaggagggcagaccactttaggtcaggagttcaagaccagcctggtaatattgtgaaaccccgtctctaataaaactgcgaacatagccaggcgtcgtggcccaaacctgtagtcccagctacttgggaggctgaggcaggagaatcacttgaacccagggggcagaggttgcagtgagccaaaatcacaccactgcattccagcctgggcaac[140 bp omitted]caaggtgaaaccccatctctac[139 bp omitted]gggcaacagagcaagactccgtttcaaaaaaaaaaaaaaagattattctggcacagtggcgaatgcctatagtcccagccacttgggaggctgaagtgggaggattgcttgagcctgagaggtggaagcttcaatgagccatgattgtaccactgcactccagtctggccaacagagcatgaccctgtctcagaataagagccgggtatggtggctcacgtttgtgattccagcactctgggaggccgaggcaggcaaattgcttgagcccaagagttcaagaccagcctcggcaacaacccaaaaacccatctctacaaaaaaatagaaaaattagccaagcatagtggcacatgcctgtagtcccagctactcgggaagttgacatggaaggatcccgagccagggaggtcatggctgcagtgagccatggtaatgtcaccacactccagcctgagcgacagagtgagaccctgtcttaattaaaaaaaaaaaaaaaagactgaggggaggaagtggttaggggagctgctgctgctgctaaaagaaaggaaaggttgccaggcaggtaaaatacttggcatcagctccatagctccgtcaggaagcctttgcccctacctatgcccctaccttctagtggttatggctcttcagtgaagtgccacctctgggactccttgacactaaaagtcaactccccaggcgggcgtggaacccacccagtcatttgtcaccaaacttggtgctcagcctcatgcttgtgacccaagggtgtgaaactccagcctacacctctggggcatttttttctttctttttttttttttccttttttttttggcagagccttgctgtcacccaggctggagtgcagtggcacaatcttggctcactgcaacctccacctcccgggttcaagcgattctccggcttcagtctcccaagtagctgggattataggcacccgccaccacatcctgctaatttttgtattttcagtagagacagggtttcaccacgtaggccaagctggtctcaaactcctgacctcaggtgatccatctgtctcggcctcccaaagtactgggattacaggcttgagccaccatggccagcctcctggggctttcttcctgggctcatccctgctcacaaagaacagccaggagagagctaagcccactcattcgtaggccaggagaaaggaggtgctagaggccttcctagaagaagacttcctggggactggttcttttgttcaatggataaacgggggtcccaggattttgcaaagcaagttagtagcaaggctggcactaaaacccagaggtcctggtccacaaacctggcctcagattggggagagaaggtcagagagatctaaagcacatttattgccaggcgcgatggctcacacctgtaatcccagcactttgggaggctgaggtgagaggatcacttgagggcaggagttcaagaccagcctgggcaacaaagcg[184 bp omitted]gtggcaggcacctgtagtcccagctactcgagaggc[137 bp omitted]gtagtcccagctactcaggaggctgaggcagaggatcccttgggctgggaagtttgaggttagagggagccaagatctgcactccaacctgggcgacaaagcacaaccctgcctcaaaattaaatacataaataaattaagcacatttatttattttactgttttattttattattatatatattttaagagacggggctctaccatgttgccaggcgtgtcttgaacccctaaattcaagtgatctgccagccttggcctcccaaagtgctgggattgcagacatgagccactgcgcaaggcctatttgtgtatttatttattttagagacaaaatctctctgtctcccaggctggagtgcagtggctcaatcacagctcactgcagcctcaacctccctgggctcaggtgatcctcccacctcggcctcccgagtagctgtagctgctatgcatttattatgtgtgcgcctatttgtccagccatcctcacacccagtttgtgccaagcctgagacacaagctatctggagctcacatggcatggaggttaaaagcacagactggccgggtgcagtagctcacccctgtaatcccagcactttgggaggctaatgcaggcagatcacaaggtcaggagttcgagaccagcctgaccaacatggtgaaagcccgtcactactaaaaatacaaaaattagccgggcgtggtggtgcgtgcctgtaatcccagctactcaggaggctgaggcaggagaatcactcaaacctggggggcggaggttgcagcgagccgagattgattgcgccactgcactccagccttggcaacagagccagactccgtctcaaaaacaaaaagagcacagaccatccgggcccaaaagaagcacccggcctgctatgtgtctttgctgggtggcttggggcaaacaaccaccctgtgcctcagtttacttttcagtgaaatggggatcaccatggtgtccccttcatgggatccctgtgaggaactaactaagagaaataaggtgcttagaagagtcagctctggctctgccattttgtttatttttatttatttttaatttctattttattttatgtttttcagactgagtctcactctgttgcccaggctggagtgcagtggtgcgatctcggctcactgcaacctccaactcccgggttcaagcgattctcctgcctcagcctcccaagtagagacagggtttcaccatgtcggccaggctggtctcgaactcctgaactcaagtgatccacccgcctcagcctcccaaagtgctgggattacaggcgtcagccagggcgccccgccctggctctgccattttgtaactcagtgagtcacttcatctctctgcttcagtttccctatcgcccatggcgctgcatggcttacatgagataatattcgcagtgcacttagatcagtgcctggcacacggtaagtgctgactacatgtattaacagtatcgtaagtgccgggcgcggtggctcacacctgcaatcccagcattttgggaggc[134 bp omitted]gactcaggagaatcgcttgaacccaggaggcagaggttgcagtgagccgagatcgcgccactgccctccagcctgggcgacagagcgagactccgtctcaaagaaaaaaaaaaaaaaaggatcataactaagactcgaatgcggagggataacagcctctgctacttgaaacctagtccttctggggaggaaagcccaggtgtgtggcaggtggaagggagggcgagcctaggtggtcctcttgctagggcaagaagcccccaagcacctgcccccagctgagcagctccgcgcctcctggccctggacgaacttgggcccagactggcgctccgtggcaccccctcccccggcctcccgcttcgcgccctcatcccgccccccggcgcggcctcaccagctccccctgggcagcccaaagaatgcgaagaggtaggtgggggtagggaggagggcgagccgctgggagagacaaagggcccgagtctgagcgagagacacaaagacgcgaggaggctggggagataggggaagtgggacaaggacgcggggagtgaccaggtccggaggccggactggagcccagccccacccagcccggccgggccagcgcagcgcgggggccggtctctgctgccccctggcgggtggctgcggtgagaaggcggcgcggagcaggtgttgggaggggaggaccagggcgcgcagggaggtagggagggaaggaagcagagaacagagcagggacagagagacagcgagagagactcgcacgcagagacaagagacgccgagagggagacacagagaaagagacagggacagagagacacagatagagacagagagagacacacggagagacagagacagagaagcacagagatagagaggcacagagatagagacagagaaacacagagacagagaggcacacagagacagagaggcacagagacaggccgatagagacagagatacacagaaatagagacagagacagagaggcacacagatagagacagagagacacagagacagagtcaaaggatggaaagagacatggggaccaagtgacccagaaacagtgacagacaggccgggcttggtggctcacgcctgtaatcccagcatcttgggaggccgagccgggaggatcgcttgaggccagcctcagcaacatagtgagaccccgccgcccccccgccccgtctcttttattgaaataaagaaacagtgactgacaaaggaagaccagaaacagagcgacaccgaagcatgaggacggaaagacccagagaggcagaaatacagggacagagaggaagacccaaagagagtgagagagacacaaagacacgtaagagagacagagaaatccagaaagaaacgagtgcagcgacacctagagttcggggcagagattagaaacgcacgagggtacgagaaacaggctcagggcgatgggctcgacctgcggggaggtcgcacaaccgggacgtgctgggggcagaaccgtaaagccccacgtgcctcaggcaactgtgatgagaggacccgggcaggcaggaaagggcaggattcgaactgtgggtgggacagaggccaggacggactgagctaagagaccgagagaactccggctagggcgaggggcggggctggtggaggcggggctggtgggggcggagtcggccggaagggccgaaaggggcgtggcaagaccttggcgaggcggccggtaggcagggggcggggcgtgggaactactcgggagcagagggggcgtggctagaccttagggggcgtggtttaacgccgggagcgaaggagacagaattctttggcaggggcgaccttagaatcctggggaggagcgagaatggaatcccggggaggaacaggggtggaatccggggggcggggtcagaacgccaggagggggcggggccggagccagggtcggcttgactcgggggagcagcgggtggatcctgtgacgtcagcgggttcgaaccgccggagctgagcgagaggccgggggtgccgagccgggcggggagagctgggccgggagagcagaacagggaggctagagcgcagcgggaaccggcccggagccggagccggagccccacaggcacctactaaaccgcccagccgatcggcccccacagagtggcccgcgggcctccggccgggcccagtcccctcccgggccctccatggcccgggccgctgccctcctgccgtcgagatcgccgccgacgccgctgctgtggccgctgctgctgctgctgctcctggaaaccggtgagacgagcggacggccccctgccctcgcgcggaccccctccaaccttaccttccgagctggggaagccgagcaccttccccgcccacccccggctccccgagccccctctcgcgtgcccccttcctggctggccccacagactccgaccccctacacgtccgattctctcgaggagactctgacccctcctttctgcatctctctcaccaccacccccatccttcttaatccaattgcccatcctacgcctgcttgtctgtccccctccccatttctcggattcccgcgccgaaagggttaaatcccaggaaggcctggtgccccctccccaccccgcgccgagtagttcacccggatctgggtctctgtctcctctacccctctcaggaatgtggggaatgttccccccacctaccgcagtaaggtctcgaggaagaggcgagaccacctccctcccctatttttccttcttcccggcttgggcgtctgaggcccggagagaactgaggacaagcggacctgattcgggtcccttggagggctaaggataagagttctggcgacttagggggaagggcctgagctcggagctccaaccccgaacctcagggagttgggggttctgactccgtggactccagaaaaattaggggccgggggctccgtcttcagggtccctggtagaatggaggctaggcgctaagtctaactgggatctaggtaaaactgggggcgagagaggatcaaacttgtagcttctggatttaattgtgggcagggggcttcgttttcagggttcccggcagaaccgggggacaggagactcgatctcgtgggcttcagacttaattgtaggcagaggaacgtcttctgagatccaaacagaagtgcgagcagcgggccccgtctcttgggctccagatatgatcaagggtcgaaggctctgtcttgaggctggagtctcagtcgcctgagtcccagatagaacgggaggccccgagtcccagaggctgggagactcctccctttccctatgaatggtcgggggcgacggagacgtcgccggggaagttttcctggtttcactctcgccgagccagggaggggcggggcgggcgctcctggctccgggttccggactccccggtttcgggaccttatctatcctctggtagcgcctttgtcctcagagccatagcaggaggtggacgagtggagccgccgcccttatcccccgtccctcccattgctatgccttggaccccctggcgtccttccatccaccccactaggggaggagagcggcccccctggggagggaggggctgggagggaacccttgaaagaggcgctggccccgccccttgcaggtgacccggttgtgtattcccagcgacaaactctgggatgctagagtttcccgagggtttgcgcagaagagagctcagggggatcttgggggaaccccggccacctctctggcctcatttcccccaggatggctctcactggcctcccagctttgacccagagctgggaactccgcttccatcccctgcctctcccttcaggcagaaataggcagatgagatcagaactggcacctctgggtgaattctccgaacccaccagaccctgagcctactgttagcttggtgcatgatctcaccgaaggctccagcttgccctgggaaacaggtcctgtttctgtttccatcttagagatgaggaaacaggctcagcaaaggcaagcagccttctcaaggtctcacagcaggtcccggggaagccgggctccggttcttcagagccccgcaccgggtgggctccaggaagtgcctctgagtttccatttcctccctcgtaaaaaaactgagataacaatcctttccctgcggaccatccggaaggctcccaggccccactgattccctgtgaaacctcttagcccctggagaaggagctgtcggcccctttcttgaccacccccaccccaatccttcgcctctgctgtccactggctggccggctggcatgtgctcgctctccctctctctctctctcccctccccctccctgttttcctccttccctcactttctttccccctcttcatctctcttcgtttctcaccctttctctctccatccctctccaagctctttctctcttctcctctccccatctctctctctcctctccgtctttctctgtatacctgtctagctccactgcctcccccgcttggcctcctcggggaatgcgggtgcaccacctgggcccccagctgggccggctcccctcccccagctttcttccctgcccatccgtgtgtccatgtccgccaggcagccccacgtagtggagggggaggggagcagagggacggcagcctggctgtctcctctcattagggaagggggactgggcagaggagaagttggggggtgggtatatagagaggctggagctacaaggatgggtacagaggccaatagagggaagcggtcagacacagatttaggaatggggtcagagacacgtgtaggaatggaatcagaggatagaaggggagtgaaatgccggcacagggtcgggggagtgaaataccgacacagggatgaggctgaaagacactggaatgggacggaggagggtgggggaagggagctagacatagataccagatgaaggcagggacaggaaaaggaaaggggtttggtgacaggcagggagccccaaagactccagctgtgggacagcagaggtgccgtgacccacggaggtcagggtacagggggcctcaaggccagcgacatgtgggggccacagggagtgatgaacacagaagggacagggagctgggcacatgggccagctcccccgcccctgcctgggacgctgttacatttttaatgtcccagcagtgctgacaaatggagcaggaaggggaggagaagaggggacccagcaagatgggccaggctgtgagaaggtgtgtcagaaatatggggagacagggcactggagacccaggaggcagggagactccacagtcagagacagaaacagagacgtagaccagaaggcttgtgagaagagaaccccaggaatcaaggcagagagccaggttccagacacagggagacccagacggagaaagagaccggagatgtcagacatacagaggaaagaggaagagagtgactaacggggacagggtatcttctcaggctaatgaaaatgttctataattgctcgggtgatggatggctaactctgaatatacaaaagccactgaactgtacactttaaatgggtagattgtatggtatgggaataatgtctcaataaagctgttacaaagagacagagaatataagaggcacagagcagagaccagagactctgggggacacagataagagtgacagaggccaggcacattggctcataccagtaattccagcactttgggaggctgacgcaggagaatcgtttgaaccgagttcaaggctgcagtgagccctgattgcactactgcactccagcctgggccacagagcaagaccctgtctcaaaagagaaaagagtaacagagaccccaagagagaccctgggaattggagacacagagggacagggaccctaagaactagacacagagagagatagaagaggccccggaagacacagataagagacgctaagagacagcagggataccattaaaagactttcaagaagccaggcatggtgactcatgcctataatcctagcattctgggaggtccaggcaggtgtatcacttgagctcaggagttcgagaccagcctgggcaacacggcgaaaccctgtctctgcaaaaaatttaaaaattagccaaaggtggtggtgtgtgcctatagtcccagctacttggaaggctgaagtgggaggatcacatgagccaggaaggttgaggctgcagtgagctgagatcacaccacagtactccaccctgggcaacaaagcaagatcctatctcaaaaaaacaaaacaaaacacacggattagaggaggccagggggcaggtgcagaaatccaggcacagacagacagccctacatcctggctgctgcagccgctgctcactccctgaaccagctcctggatttccgctgtgggggttgggcactgtgattaatacaattaattaactgacaaggtgactgaggcagcagctgaggccagtactcaaagcctctggccttcaagggccttctctagtcccgacgtgccttgccatgggaggctgggtcgctgtgctttatagatctgcgggggaagccaggccctggggagccagccaggcaggagtccaggagcccagctcctcctcccctagacccaggtgtccagcttcaggccccgcctccctcagacccagaagcccaggccccagcctctcctccctcagacccaggagtccaggccccagccctcttccctcagacccaggagtccaggcccccatccctaatccctcagacctgggagttcaggcccccatccctgctctctcagacccaggagtccaggccaccagtgcttcctccctcagacccaggagtccaggcccccatccttcccctctcagacccaggagtccaggcccttagtccctcctccctcagacccaggggtccagcctcagtcccctgctccctcagacccaggagcccaggccccctgctcttcctccctcaaacctgggagtctaggcctccagctcctcctccctcagacccaggaatccaggcccccagccccctcctttctcagacccaggagtccaagcccccaacctctcctccagggttccataggtcactctgcaccctcctcgctgccttggtctacccatccctggatctcggggtctcaagctgtgtctgtccccattgttctcccatgggctcacactacaccctgggcagcctccactctgccaccacaggaagcctgcaggtgcagtccacagggagaggaagtgtgtctggggacccagctcacacttcatgaagctgtcaccagtctggcttgcccagtgacactgagggaggctggtgttcccatggccacagtcccctggctatggtgctggccatgtcctggccaagttcatggcacagcccctgcctagcagtgtgctggatgatgggggctcactccaggctgaccaacctcctggctgtatctcccttgcctccacctgacatgcagagcgtctgggcagcggccctcacccctgtcccctttacctccgcagccctgtcagcctccaagtcccaaccctcccagcttctccctgtcacccccaccgctggtcctgctttcccattccaagttctgagtgtgtttccaatctcgccatcctccgtccccacagccccgaccctgatcccggcgcctccccccgagacccctgccccactgagggctctttcttttttcttttttttctttttttgagacaagagtctcactctgttgcccaagctggcaatagtgtctcactctctcactctgtcttccaagctggtacagtggtgtgatcttggctcactgcaacctccgcctcccaggttcaagcaattcttgtgcctcagcctcccaagtagtggggattacaggcaggtgccaccatgcccagctaatttttgtatttttagtagagacgggctctcaccgtgttgcccaggctggtctcctgagctcaggtgagccactgcacccagcctgtgagggttttttctttctctttttgttttttttgttttttttttgagacatggtagccaccacctgtaatcccagctactcaggaggctgaggcaggagcccgagacagagcaagactccgtctcaaaaaaaaaaaaaaacagaaaagacttgggcttgtttcctgagggctctgtgcagaggagggcgtgttctgcactttctagcaggatccttctagctgtgcataggaacaaaccacaaggacaactgcagtcctccaggtgggaagtggcagtggattagaccagggcagggactggggaggcgtcagaggtggtctaactagataaatgtcaaagaaggaggtgacagggtttcctgatagattgcttatgaggtgagagagaaagaggtgaaaatgccttaaaaatggactgtaggcaggacgcggtggctcacgcctgtaatccaagcactttgggaggccaaggcaagaggatcgctttagttcaggagtttgagaacagcctaggcaacaaacagtgagaccccttctctacaaaaaaaaattttttttaattagtcaagtatggtggtgcccgcctgtagtcccaactactgagaaggctgaggtggtaggattgcttgaacccaagaggttgaggctgcggcaagctgggatcctgcactccaccctgagcaacggagtgagatcctatcccagaaaaaaaaaaaaggaatgttaaccccacagggcctgaactatcctattcattcatttggaattagaaattcagaatggggaacttacagcaatgggattttttttttcagacggagtctccctctgtccccccagctggagtgcagtggcgcgatctcagctcactgcaagctctgcctcccagattcacgccattctcctgcctcagcctcccgagtagctgggactacaggggcctgccaccacgcccagctaatttttatatttttaatagagacgtggtttcaccgtgttagccaggatggtctcaatctcctgacctcgtgatctgcctgccttggcctcccaaagtgctgggtttacaggcgtgagccaccacagctggccctttttttttttgagatggagtctcactctgtcccccaggctggagtgcagtgctgcaatctcagctcactacaacctccgcctgctaggttcaagtgattctcctgcctc[134 bp omitted]gcctcccaaagtgttggaattacaggcgtgagccattgcgcccagggattttagaacctcattcattcgttattcagcaagtactgagcatctactaggtaccaatctctcttgcagatactgagggtacaggttgtgagcaaaacagacagaagatccctgccctcgtggcgctggcagtcagtttccaggaggatgtgatatatctagtgtgtgagatggtgagaagcactatgcagacagagaacgtaacagggcaaaagggcggaagagcagtcaaccagggaggggagaggaggtggcagctgaggtggagtatctcggggtaaaagaaccccccgaggagtgtgccccacaagaagctaaaagtggtgggtttgtttgagaccgagtcctcactctgtcacccaggctggagtgcagtggcgcaatctcagctcactgcaacctccacctcctgagttcaagcgactctccctaaagtagctggaattacaggcatgcagctaatttttgtatatttagtagagacagggtttcactgtgtcggccaggctggtctcgaactcctggcctcaagtgatccatccaccttggtctcccaaagttctgggattacaggcttgagccaccgccccatcctaaagtcggtttttttgttttaatcctccaaatccagtagtgctcagatgccatcctaaatggaggattggaggggagcctcccttagaaggaagatctgggcccctggaagccacaggactgctccttaagtcaagaactctgaatctggccaggtgcagtggcttatgcctataatcccaacactttgggaggccgaggcgggtggatcacttgaggtcaggagtccgagactagcctggctgacatggcgaaaccccatctctactaaaattacaaaaattagctgggtatggtggtacatgcctgtaatcccagctacttgggaggctgagacaggagaatcacttgagctggggaggcggaggctgtagtgagcccagattgcgccactgcactccagcccgggcaacagagtga[183 bp omitted]gcgggcacctgtagtcccagctactcgggaggctgaggcaggagaatggggtgaacccgggaggcggaggttgcagtgagccgagatcgcgctgctgcactccagcctgggtgacagagcaagactccgtctcaaaaaaaaaaaaaagaactctgagtcagcctggc[174 bp omitted]gaggcaggagaatggcatgaacctgggaggcggaggttgcagtgagccgagatagtggcactgcactccagcctgggcgaaagagtgagaatctgtctcaaaaaaaaaagaaaaaaactctgaatcccagagacccagggacttggaggaggtgaagggtgtggggctccagggacctggggctcagcttttcaggtctcctcctccaggaagctcttctttcgttcatcgtccctccctccttcagacaggtcaagcctcttcaggttcctcccataccacccctactccgtcttccaggcattcttggtgataattatttgtgcaatatttgtaccccctgcaatctggatgtcaaccctggaaaacaagcacctgatttgtcctgttacttctgcagcatccacacttagcaacattcattcacttggcagtgtttactgagcacctactacatgctaggccctgttgtaggtgctggggatacagtaggggaaaaacacagacaaacctcagggctggagagggcagaccctctagcacccaggacctgtttgttgagtaactatttgttttttggatttgacctataagatgtgaaagaacagccagattcttccaggttctgccttttcctgatccctccctctctccctactaccaaatcccttccattttaaaattttaaatcctggtggggcacagtggctcacgcctataatcccagcagtttgggaggctaaggtaggcagatcacctgaggtcgggagttcgaggccagcctggccaagatggtgaaaccctgtctctactcaaaatacaaaaattagctgagtgtggtgacatatgcctgtaatcccagctactcgggaggttgaggcagaattgcttgaacccagaggcagaggttgcagggagccaagatggcgccactacactctggcctgggtgatacagcgagaatgtgtttcaaaaaaataaaatcctaagacctattagcctcctccccaacactcagtctcagtcttaacctcttgttcttttcattgccaactttttgtgtcattttgctgtctggtcatctatctctgctcagcccaccaccttcccctcaggcctccttggatgaagttaagtcattctctatttgaagaacccgcaacggctcccacttgccacaaagaggaaactaacttcctcggccccagcctactttgctgtctctgcagttcacacaggcccaaatggctttccttgaccctcattgagtggccttccccccttgcctagctaggaaggggccagagcgcttaaccaccctgatcccaaccttagtgcctttgggggccaggcgggtgataagtcccagcacctggggaatctggaggagccggaagggagtgtgccttgtgggaggggggtgatgtccttcctcagccccacccagctgttgcccccaggagccacatatccggacttctgtctggagctttagacagcaatctccaggccttctgtgtgggctgctacttcccaactgaaataacactctgtgggccaaagcaaacatgcaccacagtcagatctggcctgcagcaggcggctgacccctgctgctctgctcacctgggccacgccccgtgaacatcccccatgagcaagtccttccctggaactggcacaagggaccctggagggtggctgaaacatccccattttacagatggaggaagttgggcttggagacaaggctgccagctggaaagggtgtcagcgttaaataacaagattcagaaaataggattaagtatagagtttattcaagcctaaagcttgaggatggccaccccggagtgtggattcaagttgccccaaataaaccctttgactagctgtgattacaagtggactttttttttttttttttgagacagggtctcaccctgtcactcagtctggagtgcagtgtgtgatcatggctcactgcagcgtcagtttctcgggctcctggccttgagtgattctcctgccacagcctccctagtagctgggactacaggccctagccatcttgcccagctattttttttttttgagacggagtcttgctctattgcccaggctggagtgtagtggcacaatctctgctcactgcaacctccacctcccgggttcaagcaatcctcctgcctcagcccccctagcagctaggattacaggcacctgccaccatgcccgggtaatgtttatttttttagtagagatgggatttcgccat[136 bp omitted]actatattgtccaggctggtctcaaactcctggcctcaagtgatcctccacccacttcggcctcccatagtgctgggattacaggcatgagccaacgcacccagtctgcaagtggatttttaaggaacaaagaagagagagttcctaaattgttaccaagaatttacattgaaacagcataaggtatctgcaggtctggctcagaaaaaaagataacagaaggtattgattggctatgcactgtttattgtatcacaaattccaggaacaagaagctaatggggagggcagctgtgcaggaaccactgcctcgggcatgggtggaggaggcgtgtgaccgaagtcccctattcactgtacagtctccctgggcctgatacatttcgcatagctcagactgatctgagctatttttcttttctcaagttgggtgggggtggcccctctggactggaaaagcctcatttttcccccaagtgacacacctgagtttgtttgacttgtttcccccaagtgacacacctgagtttgtgggacttgtgtggagatgatgtatttatgtcacacttcagtcttcgctgatggcttttttttttatatttatttacattttttcttttaaggtaggcagggcctcattctatcgcccatgttggagtgcagtggcgaggtctctgggttcaagtgattccccttcctcagcctcccaagtagctgggaatacaggggcccgccaccacgcccagctaatttttgtatttttggtagagacggggttt[135 bp omitted]ccctcccgagaccgagtctctctctgtcacccaggctggagtgcagtggtatgatctcagcttactgcaacctccacctcccgggttcaagcaattctcccaccttagcctcctgagtagctgggattacaggtgcctgccaccacacccagataatttttctatttttagtagagatggggtttt[132 bp omitted]ttgctataatttactgatgatttcttacccaaagatcctcggcctgtccccacccaaggggactgccttccaccggggacccctcataagagttactcattaggatggtgttccctggggttcctgtgtgtatgacgccagggcctgtgcaccgcctccatggcccatctccatcagacagagctgggcagtggtgttggccctcgaaatgaggcttgtgccctggcctttcctggcctgggggctgagtgccaaggccacctgtaattaaactgagcttcctatgtttacttagcaagcactgacctctcatttcctggggccctatgctgagtgttccacagctattctttaatctttaaacagcccttgggacgcaggcactattattaacctcacatcacagctggggaaactgaggcacagagaggttaagtggcctgcacaaggtcgcagagccaggattcaaacccatgaactatgggccactcagtcgccatgctgtactgccgtgcacagcagaggaagatt[137 bp omitted]atggtgaactctggtctctactaaaaattcaaaaatcagccggaccgtagtggctcgcacctgtaatcccagctactcaggaggctgaggcaggagaatcgcttgaacccaggaggcagaggttgcagtgagttgagaccgtgccactgcactccaacctgggtgacagagcaagactccgtctccaaaaaaaaaaaaaaaaggtgagaaaccacttaggctggctgagaactgcaaacatgcgtccacataaaaacttgaacttgcatgatcccagcagctttatttatcagagccaaaaagttgaaacaacctcaatgcctatcagcggctgaatggataaacaaaatgtggtccgtccatgtagtggaatattattgagccttaaagaagagtgaagcgccgacacgtgttacagatggatgaacctggaaaacaagatgccaagtgaaagaagccagacacaaaggctacatagtctattacatgaaatgtccagaacaggcacatcaacagagacagaaagttgcatcgtggctgggggaatgggaagtgactgcttaatggataagggggttacttagggaattataaaaatgcccaggctgggcgcagtggctcatgcccgtaatccgaacactttgggaggccgaggcaggtggatcgcttgagctcaggagcctaagcaacatgatgaatccccatctctacaaaaaatacaaaattagctgggtttggtggctcgcacctgtagtctcagctacttggggggctgaggtgggaggatcacttcggccccagagacggtttgcagtgagcagaaatcgcgccattgcacgccagcatggacagagtgagatcctgtctcaaaaaataataccttaaaactgattatagtaacagatgtaaaactccaaatatacttaaagccactgaattgtactgtattttttattttacttttttataaaaaaattatatatatatattgttttttcttttcttttcttttttcaagacagagtctcactttatcacccaagctggagtgcagaggcgcgatctcggctcactgcaacctccgcctcctgggttcaagtgaacacgtccggctaatttttatatttttagtagagacagggtatttcaccgtgttggccaggctggtctcaaactcctgacctcaagtggcccacccacctcggtctcccaaagtgctggaattacaggtgtgagccactgcacccagccttaattgtatactttaaatgggtgaattgtgtagcgtaagaatttatatctcgataaagctgtttaaaaaaaaaaaaaactacgtaaaaaatgagcaaaggacccgaagagacatttttctaaagaagacatacaggcagccaacaaacatgaaaaaatgctcaacatcattaatcatcagagaaatgcaaatttaaaccacaatgaggtgccatctcacctcagtcagaatgtctgttactaaaaagtctaaaaaaacagatgctggcaaggatttggagtaaagggaccgcttacccactgttgatgggaatgtaaattagtacagcctctatggcaaacagcatggagatttctcaaagaactaaaaatagaactaccatttggtccagtattccactgagtatcctcccaaaggaaaagacatcattatatcaaaaagacacctgcgcttgtatgtttattgcagcactatccacaacagcaaagatatggaatcaacttaagtgtccatcgatgaatggaggattggataaagaaaatgtggtctatatctacaaagatttcatgacgaaattgccaaaagcagtgcagcaaaagcaaacattgacaaatgggatctaattaaactaaaaagcttctgcacagcaaaagaaactatcctcagagtgaacagacaacctacagagtgggagaacatttttgcaatctatccatctgacaaaggtctaacatccagaacctacaaggaatttaaacaaatttacaagaaaagaaaaacctaaaaaagtgggcaaaggacacgaacagacacttctcaaaataagacagtcatgcagccaacaaacatgaaaaaaatgctcaacatcactgatcgttgagaaatgcaaatcaaaacaatgagataccatctcacaccagtcaaaatggccattatcagaaagtcaagaaacaacagatgcaggcaaggttgtggagaaataggaatgcttttacactgttggtgggaatgtaaattagttgaactattatgaagacagtatggcgattcctcaaagatctagaaccagaaataccatttgacccagcaatcccattactggtatatacccaaaagaatataaatcattctattacaaagatacatgtatgcgtatgttcattgcaggactattcacaataccaaagacatggactcaatccaaatgcccatcatggatagactggataaagaaaatgtacaggccgggcactgtggctgacgcctgtaatcctagcactttgagaggc[135 bp omitted]gaggcaggagaatggtgtgaacccaggaggcagagcttgcagtgagccgagatggcaccactgcactcaggcctgggcaaaagagtgagactccgtctcaaaaaaaaaaaagaaaagaaaaaagaaacctgcacatgtatcctggaacaataaaaaaaaaaaagaaagaaaatgtggtatatgtctaccatggaatactacacagccataaaaaaggatgggatcatgtcttttgcaccaacacggatggaactggaggccattatcctgagtaaaatagaaagtcaaataccacatgttctcacttataagtggaatctaaacagcagatacacaaagattggaataatggacagtggagactacaaaaggtgggagggagggaaacaggtgagggttgaaaaattaactgttggaggctgggcacagtggcgcacacctataatcccagcactttgggaggccgacacgggtggatcacgaggtcaggcgttcgaggccagcctggcc[225 bp omitted]actcgggaggctgaggcaggagaattgcttgaaattgggaggtggaggttgcagtgagccgagatcacaccactgcactccggcctgggcaacagtgcgagagtctgtctcaaaaaaaagaaaaattgactgttggaagccaggtgcattggtgcatgcctataatcccagcactttgggaggctgaggcgggctgctcactttgagttcaggagtttgagaccagcctgggcaacatggcaaaaccctatctctacaaaaacaaaaattagccgggcactggtggcacatgcctgcagtcccagccactcaagttgcagtgagccaagattgtgccactgcacttcagcctgggagacagagtgagaccctgtctcaaaaaagaaaaagaaaaattaactgttgggtacgctgtttgctattcaggtgatagatatgctaaaagcccagacttcacctctatgcaatatatgtatgtaagaaactggcacttgcacctgctaaaaatataataattttaaaatttttattttaataaaaaaatagaaacttagggccaaggggggagctgatcatttgaggtcaggagttcgagaccagcctggccaacgtggtgaaagcccatctctactaaaaatacaaaaattagccaggcatggtggcgggcgcctgtaatcccagctactcaggaggctgaggcacaagaatcccttgaaccagggatggaggttgcagtgaccaagattgctccactgcaccccagcctgggcaacagagcgagactcagtctcaaaaaaaaaaaagaaacttgagaaaaaatgctatgtaggaggtctgtaggtttcataggaaggtgagagaaagtatattactgaggggggatgaagacaatactcagcctttaaatgttttaaaatgtattttatgaaagtttttttttattgatttattttcagaggattccccccccccaaaaaaaaatcttatgaaaattttggggtgggctgggtacagtggctcacgcctataatcccagcactttgagaggctgaggtgggaggatcacttgagtccaggagttcaagaccagcctgggcaacatagcgagacattgtctctaccaaaacaaacaaacaaaaaatacaaattagccaggtgtggtggtacatgcctgtagtcccagcttgaacctgggaggtcaaggctgcagtgagctgggtggcccactgcactctagcctgggtgaaagtgaggccctgtctgagaaaaaaaatgtagttgaaagaaaagaaaacttttatttttttattttcttttttaattttaaaggcagggtctcactctgttgcccaggctgttcttgaactcctaggctcaagcattcctcccaccttggcctcccaaagtgctgagattgaagtcttgagccactaccctggccatcat[139 bp omitted]cagtgaaaccccatctctactaaaaatacaaaaaagaaaaaaattagccaggcatggtggcaggcgcctgtagtcccaggtactcaggaggctgaggcaggagaatggcgtgaacccaggaggcggagcttgcagtgagccgagatcgcgccactgcactccagcctggtcaacagagcaagactccgtctcaaaaaaaaaaagaagaatggcctggagcctccctcaccttctccacctagacccacttgacaatgggtgacatattttggtttttgctgaaccatttaggagtaacttgagatcatgacattgcgacttcatatcttctgggaaaaatagtgtgtgcacagccacaatttaattatcacacctcggaacatgaacagcaattccaaaatcatatgtaatatgaactcatagtacacgttatagttgtataatagaatagtcattttagtcttccctaaaatgtcttttccaggtggcttttttggaatcaggatgctgcgaagctgcctacgttgcatgcggagcctgcatttcccgtggggcccccttcgtggtggccctgcctggaggtgtctgggtccctcccccacccgactacttcactctctgtcctctctgcccaggagcccaggatgtgcgagttcaagtgctacccgaggtgcgaggccagctcgggggcaccgtggagctgccgtgccacctgctgccacctgttcctggactgtacatctccctggtgacctggcagcgcccagatgcacctgcgaaccaccagaatgtggccgccttccaccctaagatgggtcccagcttccccagcccgaagcctggcagcgagcggctgtccttcgtctctgccaagcagagcactgggcaagacacagaggcagagctccaggacgccacgctggccctccacgggctcacggtggaggacgagggcaactacacttgcgagtttgccaccttccccaaggggtccgtccgagggatgacctggctcagagtcataggtgagcagggtaagggcgggaggcaaggaggtgggagggccgcggtgtgggagcatccccttgcgggtcagtttctctcttggcttcagctgtgaggttcacattctctgtgggtttccatccatcagcaaatgttcattaagcacctaccgcgtgccagatgcttttctgtgtgctgaggatgtggcaggcaaccaggcattcttgggaaaaacaaaaaaataagtattggctgggcgcagtggcccacccctgtaatcctagcactttggaaggccgagatgggcagatcgcctgaggtcaggagttcaagaccagcctggccaacatggtgaaaccctgtctctacgaaaaataaaaaattagctgggtgtggtggcccgtgcctataatcccagatactcaggaggctgagtcaggagaatcgcttgaacccaggaggcagaggttgcagtgagccgagattgtgccaccactgcactctagtctgggtgacagagcaagactcggtctaaaaaaaaaaaaagtattgaggttgggtgtggtggctcacgactataatccaagcactttgggaggctgaggcaggtagattgcttgagcccatggtggtgcgcagatgtggtcccagctacttgggaggctgaggtgggaggatcgcttgagaccaggaatttgaggctgcggtgagctgtgatcatgccactacactctagcctgggtgacagagtgaggccctatctctaataaataaataaaagagtaagtcaggcagttaaaggggccatggaagttggagagggccaagttgcaattctagctaaggaggtctggggatatttaggcagaaactaggagaggaggagccctctgggtatctaagggaagagcgttccaggcagacggaatggcaagtacaaaggccctgagacaggaatacctggagtatttgagggccaggaaggaagtcagggtggctggagacatatgagtgggggaaagtaggaagcaataaagtcaaggagaggatggggacagattggcaaaagccttgtggactataagaagcctttggcttttgcccagggaggataagagctgtagtaggttcttagcagcagacaggtttgatctggcttgggttctcaccagctcctcctggctgtgttgggaggggaaagaatgggagctgagaaaccacagggtaaggcaactacaaagtccgggtggggccgggtgctgtggctcacgcccataaccccagcactcagggaggccgaggtgggaggatcccttgagcctaggaatttgagaccatcctaggcaacatagtaagactcttgtctcaatgacaaaaaaaattttttttttttttgagacagagttttgctcttgttacccaggctgtagtggagtggcgcgatctcggctcactgcaacctccgcctcccaggttcaaccaattctcctgcctcagcctcccaagtagctgggattacaggctcccaccaccacacctagctaaatttttttgtatttttagtagagacggggttgcaccatgttggccaggctggtcttgaactcccgacctcaggtgatccgtccacctgggcctctcaaagtgctgggattataggcatgagccactgagcctggccaggaaagaaaaaaaaattgttttaattaaccaggctcagtgacttacctgtaatttcagctactcgagagactgaggtgggaggatcacctgagcccaggaggttgaggctgcagtgagctgtgattgtgctactgcactccatcctggacaagagagcgagaccctgtcttaaaacaagtccagtccgggcaggaagtaaaacggcttagaagtaggggacatagtggcctcattgagataggatgtgcagggaaggcgtcttagtcaagtcctggagtctgagaaggagctacctttgggcatagcagaggggcacgggcacagaaacctgggaggtgggcatgagatgggagctgggcgcgttccaggaatggaaagggggctggtgaggataggcaagggcttgggtgaccctcagcggggccacattacacgggcttcacaggtggaggcgaggaggctggactatgccctcagcatggttaagagccatgggaggtgtcaagccacaggagagatctggacaaacgtttgaggttgcaaaaaatgaccggcagcagtatgaggagtgattggaggagtggacggaggtagaagggagctgggacgagaggggagaagaggcattgctgggaagacggatgaggcagtggggggcagagggaagcgggcggcatatagtggtgtttttagaagatagtaggtgctggg[135 bp omitted]ctgggcaacatggtgaggccccatctctacaagaaaaaaaaaaattagctgggcatggtagcacacacctgtagtcccagctacccaagaggctgaggtgggaggatcgcttgggcctgggaagcagagattgcaagtgagccaagattgcaccactgcactccagcacgagaccctgtctcaaaaaaaaaaaaaaaaaaataggactcccagcgggaaggtgactgatacttggcaaaaatagagaaggcagggaagattttttttgaaggatgcttttttttcttttcctttttctttttttttttttttctttttttgagacaaagtctcactacattgtccaggctagactcgaactcctgggctcaggggatcctcctacctccgcctcctgcatagctgggattacaggcatgagtcaccacatcca[135 bp omitted]cccatctctactaaaaatacaagaaattagccaggcgtggtggcgggtgccttagtcccagctactcgggagattgaggcaggagaatggcttgaacccgggaggcggagcttgcagtgagccgagatcgcgccactatactccagcctgggcgacagagtgagactctgtctggaaaaaaaaaaaaatatgttggaagtcccctgggagcccaccttccctaggcaacttcccagaagccacgtcactctggatgccttttcttcccccttctcagcccagagcgtctgagaaggtcaccctgtgctatccttgagtaaacacttccctttccagtaacacatgaaaccacagccgttttccataatacaaaggacagctcttctcctccccaccctcacaaacgcctctcttcttgtgcaatcatttgttctcatccagagataacttcagggctgggcacggtggctcacacctgtaatcccagcactttgggaggctgagaggcaacaagagcaaaactctgtctcaaaa[142 bp omitted]aaccctgtctctactaaaaatacaaaaaaattagccgggcgtggtggcgggtgcctgtagtcccagctacttgggaggctgaggcagg[135 bp omitted]tttaatcaagcccaaagcttgaggatgaccacctgggagcatagattgaagttgccctgaatatacacttcaagcaggggccaaggcaagcagctcttgcaagtgagcttttgtttgtttgtttgtttcttggagagagggtctccaaaactacaaataaaaattagctaggaatggtggcgcacacctgtaatcccagctactcaggaggctaaggcaggcgaattgctgaaaccagcaagggcaggttgcagtaagctgagattgcaccactgcactgcatcctgggtgacagcaagactctgtctcaaattaataaaaaaaaaagagagagagagagataacctcaagagcttccgtatacacactggtgcagaagtaaggaacaaaacagccaaagcctctgtcttcatgatgcgtgagccaccaaggaatagttggccagagtcggcggtcaggaaagtgcccttgacgaagtggggcttggagtggggtctggagaaggaggccaaagcaatccaggcacaaaatcaccaaccaaaaccccaaagtgggtggaggcagagactgaggagggcgtggatggggagcatgtggagtggccaggggaggtggccatggggaagtggtgggctcgggccctgagtcactattctaacagcttggagggcggccaggaggatgtggggaggcttgttggatgctccacgatggtcaggggagaaggcggtgggaagggagagctgggaagaagaggagagtcagaccgtgttgagaagttcagaggtggatacccaggtccagaaagcaacagaagatgtgagtctgggtgggggacacacatcataagcatgagctgctattcttcctggagttttgtttttgtgatttttttccatgttttccaagagaatgaggtggaaagggtataaaaaaaagaaacggctttgagattttctgcctttatcacacttccagtcattcaatcatctaatggtgattacaggaaaaggaacagggggcctttccagctggacctttgaaccacagtactcagttactcgctcggccttgatttgctttttttttttccttttttttttttttcttttggagacagagtctcactgtcacccaggctggagtgcagtggcacgatctcggctcactacaacctctgcctcccaggttcaagcaattctcttacctcagcctcccgagtacctgggattacaggcacctgccaccacgcccagctaatttttgcatttttagtagagatggggtttcaccacgttggccacgctagtctagaactcctgacctcaggtgatctgcccacctgggcctcccaaagtgctgggattacaggcatgagccactgcgcccatcctaatttttgtattttcagtagagatgagttttcaccatgttggccagactggtctcaaattcctggcctcaagtgatccaccctcctcagcctcctaaagtgctggtattgcaggtgtgaaccaccacgcccgaccagcttttttttaaatctcagcctcctctaggcttttggaccctgtctctgcatctctggcagggcgaagagacagtataccgaaatggccaggccaggcgcctgtaacctcagagctttggggagccgaggtgggaagatggcttgtgctcaggagtttgagatcagcctgggcaacatagcaagaactcatctctacaaaaaaatttaaaaattagccgggcatggtggtgcatgcctatggtcctagctactctggaggccaaggcgggaggatcacttgagcctaggaggtgcaggctgcagcaagctatgatcacaccactgcactcgagaccaggtgacagagcgggcccctgtctctaaaaaataaataaagtaaaataaaatgggcaacacttggatagggcagtgcaggccagacattaccctaagccatttacctatcaatgtattatttaattcacacagcaatcctaggggtgggtactttcattatccccattttacaaaacaagaaacagctacagagttgcaaaaccacttatcccaagccaggccgctgataagcagcagagctgggattggaaccccggcagttagggcctaaccaccctgctcctctgctgagtgtttgttgaatgactgccggtgaggagtgacgcaccccctctcctcctctccccagccaagcccaagaaccaagctgaggcccagaaggtcacgttcagccaggaccctacgacagtggccctctgcatctccaaagagggccgcccacctgcccggatctcctggctctcatccctggactgggaagccaaagagactcaggtgtcagggaccctggccggaactgtcactgtcaccagccgcttcaccttggtgccctcgggccgagcagatggtgtcacggtcacctgcaaagtggagcatgagagcttcgaggaaccagccctgatacctgtgaccctctctgtacgctgtgagtgtatcgggggtgacccctcccccatcaaaactgcctacactggcttctctaaagcactgtctacattgtctctgaatgttgtctacgtgggttccctgaagccaaattctgcactaccttcctgccattgtctacactggctcccatgggcaaatctacatacttccccctcattgtctacattggctttactgggttcctgcatgctgtgcctagtctgtggtaacctgggatgggcttgcaagagccagtttgatacatttctttccaattccacatccaatgaagtcttctcggtagcttgaaatcaaccttggggaatatttacaccaaggaaattggcaaaccctagaaatgggggcttcttttattccccagagagttggtttaccagcaaagagctgcccccaacagtgtcttttctggctcccatggaccccggttgacactgcccctggaccgttagatcaatcatgctgggccatgtccacatgtctacatgtctacactgcccaacctaacatcgtctccacaccttcccatacttctgccttgacttccctaggtgccatctatactgagtctcccagagtctctacaccgacccctgatccttgatattatttacattgtatttattatttattatttattattatatttttatatattatatattatataaaatatataaattatatattatatattaacatatattttgtcattatttattattgttatttaatataatataattacattatattatatattacattacaggctccaccccccgggccctgttgatcctgacccctcccactgggttttttgctagctcttccagaaactgcctatactcacacctcgtaatgttacccagagaggccaccctggcactcttcacacagaatccctcaaatactggcttaaccacctcttccaccactgtccaaaatgaccacatatcccaactcaatgttgtctacactagctccccaggcaatgcctccacttacacagattccctaagccaagtctacaccagctcccccaggcaacatgcatcacgtgcgcccataagtgcaacagctcccctgagcctcgtctgtgccactttcctcccgggacctacactggttgcccaaaccctgttttgacatcctccctccatgccaaaaacacacacacaggccgggtgcggtggctcacacctgcaatcccagcactttgggaggccaaggcgggcagatcacttgaggtcaggagttcgggactagcctgggcaacatggtgaaaccctgtctgtactaaaaataccaaaattagctggacgtggtggtacatgcctgtaatcccagccatttgggaggctgaggcggagggatggcttgagcccaggacgtggagtttgcagtaaaccaggatcaccccactgctctccatcctgggcaacagagcaagatcctgtctcaaaaacacacacacacacacacacacattatttgtagtggctcccttaggcactgccagcactgaacaataactcccacaaaattatccacagtggtttccctgaacagtgtctacactgacatcagcacacaacagcctggactgatttgccccagacagttttgactgctgtacctcctgccaacccgccccgtttctttagcattcctgtctatctgctaacttgtccacccgctctgggattctcctccttgctgatccagtccccccatttcccccagaccctcctgaagtgtccatctccggctatgatgacaactggtacctcggccgtactgatgccaccctgagctgtgacgtccgcagcaacccagagcccacgggctatgactggagcacgtgagtcacgtggtctcagaaccctgggtctgagggaggcggggctgggggcctggactcctggatctaagggaggaggggctgggggcctggactcctggatctgagggaggaggggctgggcctaaattcctaagtcctccaggatgaagggagcttgcattttggcaatttggggtctccgggagtacttaggtccctggagcttggctcctggtgggtgtatctttagggatgaggcctgtgctcccctctcgaccttggtatccctctcacctgaccccacacccctccaggacctcaggcaccttcccgacctccgcagtggcccagggctcccagctggtcatccacgcagtggacagtctgttcaataccaccttcgtctgcacagtcaccaatgccgtgggcatgggccgcgctgagcaggtcatctttgtccgaggtgagtgggtcttgggggccgtgtgtggagacctgggtccgctcccctggagttctgcccttcaggacttggggctgcactgggggaggctgcgccgccgacctgggagggatgcagacctgcctggctgaggggagatgagggttggccttcccctcgtggcctcagactggggtctggatttggggtgtcggggtaggtgaaggcagcagagttggggggttgaggactttgctcggggttcctagaaagtagaggcctgggtagggtcctcacgaatagacccgaggaagctgccctgggctccagctcctgagaaagacgcacacctagagtcaggcatgcaaacttcaaagagacagaaaccaagagctcccacccccagaaacacaatccggccccaaggcacggagccaaagaggaaaagcacaaagccagaccatcacccagtgatggaaactgggtcaaactcacaactgcagggccacacacctagagcgcggccgggactgttaacagagccatgcttcctgggacagagagacccctgggtcctggagatagggccagagacccctcctgtcagagccacagctggcaggatccacagccacagacactccctgtgctgagaaattctgttgcagagatgcatcagaatccagacactcacctggatggtaaccctgcacgctcaaacccattgtcaccaagacacacacccaggaggacagtggcaccagccaagatagactgaacgaagccagatgacacctggaaagggacattctttttttttttttttgagatggagtctcgctctgtcgcccaggctgaagtgtagtggcgcaatctcagctcaccgcaacctccgcctcccgggttcaagcaattatcctgcctcagcctcctgagtagctgggactatatgcgctcaccaccaaacccggctaagttttgtatttttagtagagacagggtttcaccatattggtcaggctggtctcgaactgctgacctcaggtgatccacccgcctcggcctcacgaagtgctgggattatatgcatgagccactgcgcctggccagaaaaagacattcttagaaacacgccagggcgacggtccatgcagcacacctgtgcaaacacgcaatgtgcaggccccccagaaacatgactgaaggtgtagggacaaactcccagacaggggctgtccctgtcatgcagacagactagccacggagggacagaagcagacccccttactgagtcataatcttagaatgcacacacacttgcagggacacccgagggaaaacagacacctcttcaggaatccagatacagccagggagataggacacccctacgggaaacactgtcacagacagcaaacccagagagacagctgtcccgctctgggctcgcctggcgcgtgaggatgcacataagtccccggaggaagacgtcacacagacacgctgggggcaaaactaatccaggacagcaacggctgcacacggaggaatgtcatccctcactcacagaccctcagacggaaaatcaaagacatcctgggaggagcttcttcccaggaaccctcccgaaactccccgaaactcctccgaaattatccagaaagtccgttagggagattctcattcaacaaatatgtgtttcctgtttgctaggcactcttgctgaggttgggaatacaatggtgaatgagccacagtccctgccctcagtagcacacccaggggagggtcagctccacccgcccagacagacaccgaactggaaatacacccctaacctctaccccagatacacctgacaagctgatcccctgcccacacacccagcaggtggctccaaggtcagagcctgcagaacacagacgcaatagagaaagactcagcgctgtggaaagacacccccacctacccacgacagtggccacagggccacccccagccaataacaccattacaaagacacgtgccttcagataatgcctgcagaaacgtgcatgctccaagcactctagaaatcccgtctcaagcagtgagtgccccgacagccacagccagaggagacacactcaaagctcctggggtcactctcagagggtctctgagccacgaacccacatccaggcacacacagagtcgtcacagagacacagtatggagtccacagcagcacgaacataggatacgaacgccgcaccacaggacagatctatctttagggagactcagagaactttttatttttaatagagacagggtctcgctatgttggccaggctggtcttgaactcctggcctcaaagcattcctccagctttggcctcccaaagtgctgggattacaggtatgagccagcacactaagcctgattcagagctttgaaccctagacatatgaacagactcagcttcgagttccaaaacaccaatgccacctccagaaacagagacaagcctcccaagataggctcaacctggtccagttagtgaccagcacaggagaaaaatctgtttcactcctcaacccagtgtatagttagagacatatataccaccctaccccctaccaaaaaagattttatcctcctttttttaatgctatttgtgagtcactaagctgatttgacagcccgctgggtcatgaccccctgtttgaaaacaacagaaacagatgtccttcctgggtctcagcccctcctgtgtgtcgaggtgtagaggtggggtcaggtgtgggtgaaccccccacccccgtctgtcccagttatgccttgcatgcagggatgggggaagtggatgtgggtaggttctggttacattgacttctgtccctggcttggggcccaggagccccatccctccctgctcacactgccctcctcagcacttcatggcttcctctctctctccgcctccccactacctcccatcccccatccccacctgctcagcccctgcagggagcactaaggaagtcccactgtcccggtctgtgagaaccccattttacacactggggataagtggcctagagatgaggcagccacggcacttggaataaatgctcccagccactcaagagggcagaattatcaggaatctgtggccctctgcagagagctttgggatcagacagcctcccactgaaacccagctgtcctcccccgagggggtgtggcccccaagctcatagctttgtgaggaccccacagcacattcagggagggctgcgaagtcagatggcaccagggtcctggccagtgaccgggcggccagatctattgcatccaaatagccagcttccactcggctacggcgatcgccagacatgggagtttggtgttgctagatctgatttgtccccctaagagaaacctggatttttaagtgaaatcgcctgatttttgaaaggttggctagcaatttaaattttgcaaaacactaacacctggggaccaccggttggcatccccctccttgtacaaagtggtgctcaggctgtagcgaagggcggaggggcttctgcttccccacccccctcctcctcctcctccattcttctgcccagagtcaccccctcattctggtcactcccgctccctccatccccgcctatcctgcatctcccccaccccctcactccccagagcgatcctcgtgatcttgtgtctccctttctctctctctcacccctccttctctctctcctcagaaacccccagggcctcgccccgagatgtgggcccgctggtgtggggggccgtgggggggacactgctggtgctgctgcttctggctggggggtccttggccttcatcctgctgagggtgaggaggaggaggaagagccctggaggagcaggaggaggagccagtggcgacgggggattctacgatccgaaagctcaggtgttgggaaatggggaccccgtcttctggacaccagtagtccctggtcccatggaaccagatggcaaggatgaggaggaggaggaggaggaagagaaggcagagaaaggcctcatgttgcctccacccccagcactcgaggatgacatggagtcccagctggacggctccctcatctcacggcgggcagtttatgtgtgacctggacacagacagagacagagccaggcccggccctcccgcccccgacctgaccacgccggcctagggttccagactggttggacttgttcgtctggacgacactggagtggaacactgcctcccactttcttgggacttggagggaggtggaacagcacactggacttctcccgtctctagggctgcatggggagcccggggagctgagtagtggggatccagagaggacccccgcccccagagacttggttttggctccagccttcccctggccccgtgacactcaggagttaataaatgccttggaggaaaacatcaggggtgtcttgtaatacatcagaccccctccttgcatgttggggaaagagagggtgggacagggactcctaggtcccagggctgggaagagctgatccacgcccccggggaacgagagcctggcaggggttagactggggaaggctgtggggctcggaccacttggatccttgaaagacgcattggatggccgagaaccgcaaggctcgtgcaactaggattcaggtcactggattggggactcagaggcctggacatttggactcctgggtcccaggacagaggctgcctttctggatggtgtggccagacccatcagaggcaggagttctctggactcctgggccctcgggtggaggtgggggtggggacagcaggggctcagccaggttccctgcgtcctgagagaatgaggccagagggctgtgatccagtggagcctcagacctcaactcccccaggttgctgggggtctcgggaggggagggctgctccccactcccattcttaggggccctgagggcatggggcaggcggggggtgctggggaagtcccacctctggccaccccgactgtggctcccctccttctccatccttgcccccagggatcaccccaggggacttttcagtggctccctgggagtggcggcagctccctccagctcctctcaactggaaaagcaaagacggggggaggggcggcccttggtccttgaactcccaggctcagtaagggacaggtttttacccgcgtcacctctgctctcccaagcctccatgcctcctctgtaacacggggcaggtgtttccatcggcctcacaaggctgtcgtgggacccagtaaggacatgcccgtgatgccctcatgcagcctcattgacctccacagaccccaccaagccctgtgccaggcagtgctggggctgcagctgtggcctgcacagacccagtgccgtcctccggtgtgcacggccataatgaccacaagaatagcagcagtatgtttaggatgaaggtgtgtgtgtggaccgaggggcagtctctctctctcactcccccaccctctgaagccctccagaggatgccaggctgtggaacgggagcagtggagatccaacagtccagcgtcctctggaagcttcctcctcatctggagagtgaggccgatgcatgcgtgacccccacgggcccttccatacttgttacttcctctggttgtttgttgtctgtactcacccacccaccccacccggacaaccggagggcaggggcggggaattgggtccgcctggcacacagtggatccttcagtgccatgctgagtcctccttacacacccagcaaacacctactgtgtgccgaacctcaggcacacagtctagtatggaaattggcaagtaaacgggtaaccactccaaaaactcttccattaggaaagacttgagaaatggaaacgggaggtgctagcaaggaaggagaggcccaggagcaaacaggcttctcgcttctcgaccccttttcctgtcttgccttttttttttttttttttttttttttttttgagacggtgtctagctctgttacccaggctggagtgcagtggtacgatctcggctcactgcaccctccacctcccaagttcaagcaattctcctgtctcagcctcttgagtaacgcacccagcctttttttttttaagaagtggggtggtctccctatattacccagattgggctcaaactcctgggctcaagcgatcgatcctcccacttcagcctccaaaagtgctgggatgacaggtgtgagtcactgtgcctggcccctggctaattttttttttttttttttaagacggagtttcactcttatccaggctggagtgcaatggcgcgatcttggctcacggcaacctccgcttcccaggttcaagcaattctcctgcctcagcctcctgagtagctgggattacaggcgcgcgctagcatgcccagctaacattttgtatttttagtagagacagggtttc[141 bp omitted]ggtcttgtgctcgttgccctggctggtcttgaacaatccgcccgcctcgccctcccaaagcgctgggattacaggcgtcagtcactgccccaagccctaacccccttcctgataagtggaaggagattctagtccccagaggtgattctggatcccagaattctgtccccgcattctctgtcttctagccgcccctggtcctgtctcctctcctctcatcttcccactctgccccgcctcattctgccccagctacacagtctacttgctgttctttaaaaacaatacaaggcaggccgagcacggcataatcccagaacgttgggaggccgaggcgggaggatcacttgagcccaggagttcaagaccagcctgggcaacatggcaaaaccccatctctacaaaaaaattcaaaaaaaaaaaaaaaaagctgggcctggcggcacatgcctgtagttccagccactccggagggtgaggtgggaggatcgcttgagcccaggagattggggctacagttggtggtgatcatgccactgcactctagcctgggtgacaaagcgagaccgtctcaaaaaaaaccatagagccccacaagcctcctgcagggccgctggctgtttgcgctgcctgcgatacccccagacactctcatgactcatccccggtgtctctttcaggcccttgctcagttgtcaccttacagtaaggtagaggccctcccactaccttcggggaccccactttgcacctcctatcacttccgcactgtatatttttgtatcccccgtgacttactcccatctggcatgtgagctattgtactggtttgcttactgttgttctccctgcccaaccagaatcaaagttccatgaaggtagacactttgtatgttttgttctccactcatctcccatgcggggcacacatcctcgctccttcctcatgctcagcagtttgagttgaatgaaagaatgtcccctgcccatgggagaggacatagacaggcaggcgatgatgtggggtgggatggtcgcttggaataaggagctgtggcttcctcctggagaccccctcacgctgtccctctccttgcagagacccccaacacagcaggcgcaggggccacaggcggcatcatcgggggcatcatcgccgccatcattgctactgctgtggctgccacgggcatccttatctgccggcagcagcggaaggagcagacgctgcagggggcagaggaggacgaagagtaagtgatgggccctgagacggggatgggagaggggtcgaagaactgaggagtatggggtaggggtgagggtgggagaaaattctccataatggctgtgtgaaacagacagacctaaaggaactggggtctaaatggagtagggaggtatgggtttctctctgctataaagtatggcattgaatttaaaaattagctgggggccaggcacagtggcttacacctgccatcccagcacttttggaggctgaggtggggagatcgatcgtttgagcccaggaatttgagcccagtctgggtaacataggaagactacccccatctacaaaaaaaaaaaaaaaaaaaaaaaaatggccacgcagggtggctctgaccgctccgctctgcaaagactcctcggagcccaggatcctactacattttttttttttttttgtgacggagtctcactctgtcaccgaggctggaatacagtgatgcaatctcggctcactgcaagctctgcctcccaggttaaagcaattctcctgcctcagcctccggagtagctgggaatacaggcgcccaccaccatgcccagctaattttttggatttttagtagagacagggtttcactgtgttagccaggatggtctctatctcctgaccttgggatcccccctcctcagactccaaaagtgctgggattacaggcgtgagccaccatggctggccagttgttaataaaagaagaaagggcggttcctaaattgttatggagaatttacattaaaataacgtaagctattgattggctatccattgctctttgtatcacaaattccagaaacctgaagataaagagtaacactggtcaggcagggtgggtcaggcagggtggctcctgcctctaatcccagcactttgttttgtttttgtttttgtttaagatggagtcttggtctgtcgccctggctggagtgccaaggcgccatctcggctcactgcaacctccgcctccctggttcaagcgattctccagcctcagcctctcgagtagctgggattacagatgcgcgccaccacgcccggctaatttttgtatttttagtaga[132 bp omitted]ggccaaggctcttgttgctagtggttcgagaccagactgaacatcaaagtgagacaccatctctaaaaaaataaaacaaacaaaattagccaggcaaagtggtgcacacctgtggtccagctcctcaggaggctggggtgggaggtcacttgagcccaggagctcaagtctgcaatgagctatgatcatgccactgcactctagcccaggtgacagagcaagaccctgtatcttaaaaaataaaagactgggcacggtgcctcacacctgtaatcccagcactttgggaagccaacccaagtagataacttgagctcaggagttcgagaccagcctgggcaacatggcgaaacctgtctacaaaaaaaatacaaaaattacccagacctggtagcccatgcctgtagtcccagctacttgggtgggctgaggtgggggtgggggcatgtggaggctgcagtgagctatgatcacaccactgtactccagtctggccaacagagtgagaccttgtaaaaaaaaaaaaagaaaagaaaaatagctcagagcagtctgaggtatgcgagctatgcaaaatttgtttttttgagacaggatctcactctgtccctcaggctagagttcagtggtataatctgagctcactgcaaccttcgcctcctgagctcaaccaatcttcctaccgcagcctcccaagtaaatgggaccacgtaccaccacacctagctagtttttgtatttttgtagagacagggttttgccatgttgcccaggctggtcttgaactcctgacctcaggtgatccacccacctcagcctcccaaagtgctcggattacaggcgtgagccaccatgcccagcctggaatctgtatttaccacaagctctctaagtttttctgatgcacaggaaggtctgttacaccactgtcttaatcatctagttagttcaaaccaataacttgctgctgatctcctctgtgtgcagctccatgctgtgacccactgtgtccgagacggcctggagctcacaatatggaggaggagacaaaactgtctccagatagtgatggtgtagcatgaccagtgatgggatagggcagttgagcaagctctgagaagccagagggggcatctgacccaggctggatggtcaggtagggcttcctggaagaggggacatctgagctgacagaatgcatcgtaagcacctgtcattactgtatgctttggtctgtgggtgtgtagaatgagggacaggaactttaacctaatttgagggacaggaaggcacttcatttattcattcattcttttcacaaatatttactgaactcctcatagtggattctggagacaccttgctgacgacccagatctttcttttttttcttttcttttcttttctttttttttctttttgaggtggagtttcgctcttttttcccaggctggagtgcaatggcgcgatctcggctcaccacaacctccacctcccgggttcaagcaattctcctgcctcagcctcctgagtagctgggattacaggcatgcgccaccacgcccggctaattttgtatttttagtagggacagggtttct[142 bp omitted]agatggcatctcactctattgcacaggctggagtggagtgatctcatctcactgcaacctctgcctcccgagttcaagcgattcttgtgcctcagcctcctgagtagctgggattacaggcgtgcaccatcatgcccagctaatttttgtattttttggggagatggcatttcaccatg[136 bp omitted]gcatggtaattataaataacatttcaagtacaaattcagtaagtgccctgagggggaagtacagctaggtatgtccgtgtaacaggaattcctgatccactggggaaacctgaaggcttccgggaaaaagaggaattcatggaatgaataaaaactcttactccaggcaagaaaagggggcaggggaaagggagacccaggtagagggaacagcatgtgccataaccccggagtcagagggatgcctgggtcttaatctccacttgtcctacctcctaccccacagcctggagggacctccctcctacaagccaccgaccccaaaagcgaagctggaggcacaggagatggtgagcactttccctggagcccaagctatccccacctccacacccaccccagggctgggaggggcctggcagggagaagctggctgggtggtgggggcagttcctgacctccccgcccctctcccactacagccctcccagctcttcactctgggggcctcggagcacagcccactcaagaccccctactttgatgctggcgcctcatgcactgagcaggtaggagctcatgggaagacaaaggtgggttgggggtctgggttgaagggccaggggtcaggcctggcaaaagaggtcaaagactaaaggtcataactcaaggtcaagggtgtgtccccggttggtgcttaatgcattgagatgtgttcaggattccatgggggaggtcaggggtgaaaaggcccaaggtcacaaggttagaatttaaagtcacttgggggctgggcacggtggctcacgcctataatcccagcactttgggaggccaaggcaggaggatcacttggggtcaggagttcgagaccagcctgtgcaacatggtgaaaccccgtctctactcaaaacacaaaaaattagttgggtgtggtggtgcgagcctgtaatcttagctacccggggcgctgaggaggaagaatcgcctgaacccaggaggccgaggttacagtgagctaagatcacaccactgcactccagcctgggcaacagagcaagattccgtctcaaaaaaataaataaaaccaaataaataaaatcacctgggccgggcatggtggctctggtctataatcccagtactttgggaggccaaggtagctggaccccttgagcctaggagctcgagaccagcgtgggcaacatgggctacccagcaacattttgcgtctacaaaaatactgaatttacctggatgtggtggcaaatgcctgtaggctgaggtgggcggattgcttaagcccaggtggttggggctgtgccactacactccagcctgggcatcagggtgagaccctatctcaaaaaaaaaaaaaaagaggaaaagtcattaggtcaatgaaaattgattatctggtcaggcatggtggctcacacctgtaatcccagcactttgggaggctgagacgggcagatcacctgacgtcaggagttccagaccaccctggctaacaaggtgaaaccccttctctactaaaaacaaaaataagccaggcatgggtgacatgctcctgtaatcccagctattcaggaggctgaagcaggagaatcgcttggacccaggaggcagaagttgcaatgagctgagaccacgccactgcactccagccta[134 bp omitted]catggtgaaaccctgtctctactaaaaattacaaaaattagctgggcgtggtggcgggcgcctgtaatcccagctacttgggaggctgaggcaggagaatcgcttggacccgggaggcagaggttgcagtgagcccagattgcaccattgcacaacagcctgggagacaagagcaaaactccgtctcaacaacaaaaaaaaacagaatgaaagaaaattgattatctacatttgctggatactgtgcctgaagctgggacaagacaaatcaagtcactcccctcagtggtctactggaggtcaggggtcagacactgaggttgcgctcaaggttcaaaggactgtttagagcccaaggttaagtatttgaggtcaagactgaggtgaaaggttcatggggaaagatttgcagagatcgagtgtcaaaagtgagtcccaggattaacagggtgagttgcacgagctgggctttgggttaaggaagggctgaatgaatgtcccagtgcaatatggcctcaggggacaaggagtgaggtggcatcttgttggcatggggagagagcggtcaggattttggggtcaagagcagattggtaatctgtgtcgtgcgtaggaagtgatcttgagttcctgtcctctctctacctccaggaaatgcctcgataccatgagctgcccaccttggaagaacggtcaggacccttgcaccctggagccacaagcctggggtcccccatcccggtgcctccagggccacctgctgtggaagacgtttccctggatctagaggatgaggagggggaggaggaggaagagtatctggacaagatcaaccccatctatgatgctctgtcctatagcagcccctctgattcctaccagggcaaaggctttgtcatgtcccgggccatgtatgtgtgagctgccatgcgcctggcgtctcacatctcacctgttgatcccttagctttcttgccaaggatctagtgccccctgacctctggccaggccactgtcagttaacacatatgcattccatttgtgatgtctaccttggtggctccactatgacccctaacccatgagcccagagaaattcaccgtgataatggaatcctggcaaccttatctcatgaggcaggaggtggggaaggtgcttctgcacaacctctgatcccaaggactcctctcccagactgtgaccttagaccatacctctcaccccccaatgcctcgactcccccaaaatcacaaagaagaccctagacctataatttgtcttcaggtagtaaattcccaataggtctgctggagtgggcgctgagggctccctgctgctcagacctgagccctccaggcagcagggtcccacttaccccctccccaccctgttccccaaaggtgggaaagaggggattccccagcccaaggcagggttttcccagcaccctcctgtaagcagaagtctcagggtccagacccttccctgagcccccacccccaccccaattcctgcctaccaagcaagcagccccagcctagggtcagacagggtgagcctcatacagactgtgccttgatggccccagccttgggagaagaatttactgttaacctggaagactactgaatcattttacccttgcccagtggaataggacctaaacatcccccttccggggaaagtgggtcatctgaattgggggtagcaattgatactgttttgtaaactacatttcctacaaaatatgaatttatactttgaccaggtcttgccttttctgtgggatgtgaaggggatggggtgagacatgaaggggaatgaggaaggagtctaagggcttgagagaatcagtgaactggggtcaagagagttaaagacaaaaacaaagggaccaaagatacaaaataagaattgagagagtaa[137 bp omitted]tgcctc[221 bp omitted]cagggcatgctgtttaatgaacattcataattgcaacagcagtatgatgaatgggacaaagataaaaatagcaattggccagatgcagtggctcattcctgtaattccagcacttcgggaaactgaggcgggaagctcgactgagtccaggagttaagagaccagcctgggaaacacagtgagaccccgcctctacgaaagttagccgggcgtggtggcacgcacctgtagttcagctactctggaggctgaggtaggaggatcgattgaggccagaagttcaaggctgcagtaagctatgatggcgccactgcactccagcctgagtgacagagtccaaccttgtctttaaaaaaataaaaattaaaaaagcagtaacgaaagtataagaggctcaagtttaatgaataaacggcaagtaaaagtagactaaaggcaaaatcatgaataatgttgtaataggagcccaaggcatgacggataataaacctgaatgaatgggccagaggcagagtgatgaataatggaaaaatagggaccgggggcaagggaggtaacggacaggagttcatggatccaaaacatgatggctaattagagaagggccggaagaacgacgaaagtgagcaggcaggctggagctaaaagtagtctgggcaatgaagctcaaatgaatggggcagaggcatgatgggtaatgggagaggaatgaatgggccaaagatagaagccgcagtgacgcgaggaacaagaggcatgatgggtaacgaaaggggtgggtctaaggcaactgtttcgctaagaggtgatgagggcattgtgggtaacgaggagcagcgcagggttcgcagaacagattagaattctcccgaggcactctgggaagggccagcacttccggttttaggtcggctactccgaaccagaggtggggtgggggcccggctgccgcggtgcctggtgggacgcgaggcctgaccttgctgcctagccgcctctgccgcgcaacccacctttacctgtccttcgaccctggaacgttagccaatgagagtaccaagctgatacgccaccaaggtcgaccccgtacacgctggagccaatcaaaatgctgcaagggtcaaagccgaccaattatcacagcaacctcgccgcggggcggaatcaaaagagggcctcctccaggagagaggcggggcgatgcctcagcgggcgtggcaaaatgctcagcacagaccaatggcgggttagcaccggaacccgcggcgacgcgagccaataggcgcaggcgctgcgagccaatgggaagggtgggaggggcgccgtggctaccctgcgagtgagaaccaatacaaaaggacatttcagggaaagtgggcgggactttatgcacaagtccaatgggaagaccgagtcttgacgctggtgggcgggcctcagggcacactaaaccaatgggctaggtggggcggggcgacggtggtggcggcggcggcagcgggttcggttgcgcgtggcgcacggggtgggagcggagcccaggccgggagcaggcgccgccgccagtgagaaccggggccggagccgggtgcggatttgctggggctgagtcgggggcgcgcgggccctgacctctgccctctgacctctcccctagcaggcgaccatggggaacgtgttggctgccagctcgccgcccgcagggccgccaccgccgcctgcgccggccctcgtggggctgccgccacctccgccctcgccgccgggcttcacgctgccgccgctgggaggcagcctgggcgccggcaccagtacgagtcgaagttcggaacggacccccggggctgcaaccgccagcgcctcaggggccgccgaggatggggcctgcggctgcctgcccaacccgggcacattcgaggagtgccaccggaagtgcaagggtgaggggcgaggggcccccgctgggctgcgatggcctggatctcgggggaagggggaggacactggggactctgggatttggcgcgcaccattggaattatttaacagcactaggaggtgatgttgggatcgaatggtggaacgttggacttggggcttagaatgatggaatcaaatgctggaaacgggatggaatgtcatagcagtagagaaaagcctttagggacctgaggagccccgggatcagccaagccagacttctcttgtgatcgggaaggcaactgaggcccaaggtcacggtgtcagcaaggtgtcagcgaggttccttgggtatgggacccaaagcctccggatcccagcctggagcaattagagtagtagtagtggtggagatttatggagttctgttctggtgttcattatacgttaactcattagatccttgggacaattctgtgtggtgagggtcccatctttcagatgatgagtttgacctaaagttgctcagcttggtggcagtgagatttgagcaagcaaaggccctggccctgtctaactaggctgtactgcctctttacaggtggaatcctttgtgagatgttctgctgtgggtctctggagagagctgggggtggtagggaaggaagagatgagagttggtgtggggttggagtggagtgtgacagcgtttctcttctccagagctgtttcccattcagatggagggtgtcaagctcacagtcaacaaagggttgagtaaccattttcaggtgagccttcctggtgtccttacccaccagagatcgtccccgccgtccccctccctgcatctgcacactcggcccaattactcctccctcaagagctgggctccctgatacttgaaaagactcggagatatagtgccagactgactactcagtttggggacctagaatccagaggtactgtctccccatagcagctaggctggagtgaaggaacaggtctgtgggcctaccggcagcacctcctttctctgagtctcttagtcaggccgtgcctcccagtcttcatcccctgcccagcccagagaccttgtccttgccctcttcagtgggcaagcctatctgtccagtatcgtcacagctctcgctttccttccaggtcaaccacacagtagccctcagcacaatcggggagtccaactaccacttcggggtcacatatgtggggacaaagcagctgagtcccacagaggtgagcttcctttttcatccattcattgtatccttctaataacaaatttgtagccaaatgtcaagctaagacggcctcatcaggaaaaggtcacagctaccgagagcctggagatggggattgcatctctccgaggtgcactgggacacaaataattccttcatccagcaaacatccgccaaacccctgctctctgcctggccccatgctgagcagtgctggggatgtggccacagccaccctgtcaccagacagcgatgacccagggtggaaagggctggactgtagatcatgcagaactttgaatgccagactaggctttggactttctctagggggttgtggagagtcatggcatggtttggtcaagggaaagacgtggtccacaggttcccgctgtagaaatctctggggcatctctggggtggccatgtgggggctagttattaggaagggcaaaactggaggcccagacagggttggggggactgaatgaggtctctgcttctgtcatttcccttcagcaaatgtgtttattctgcaaaccttcattgcacaacacattctgtgcccagccctgtgctggcacacatgactgaaacagcatgggactcacccgtggggcaggggacagactgttcccagagagtaacaagccaggatgggcaaggctgacatgggggaacccaaaggtcggggagcctaactcagcttaggtggtcagagagcacttcgtggaggaggggacccccatccgaggctttctgaccctaggcttctcaccccggcccatctcacatacttgcacagtgcaccacctctgaccccttccgttctctctgcctcacaggcgttccctgtactggtgggtgacatggacaacagtggcagtctcaacgctcaggtcattcaccagctgggccccggtctcaggtccaagatggccatccaggtgagtggggcacggaggctgctgctcccctcggccaccgtgagcagggagccgccctcacaccccctcctctccacagacccagcagtcgaagtttgtgaactggcaggtggacggggagtatcggggctctgacttcacagcagccgtcaccctggggaacccagacgtcctcgtgggttcaggtaagaggcggagggcttggagggtggtcacaaaactgcagttctggctttgccagcaaatccaccccatttgtgaacctccttttctgccactggagaagtggctcagcaggagtgattttgaaacatcaggcaacatactacagtgggtgagacggtcacccactgaccatgagtgggtgagtcagagcagtcttttttttttttttttttgagatggagtcttgctttatcacccaggttggagtgccgtggcacgatcttggctcactgcaacctccatctcctgggttcatgcaattctcctgcctcagcctcccgagtagctgggattacaggcatgcgctaccacgcctggctaatttttgtatttttagtagagacagggtttcaccacattggtcaggctggtcttgaactcctgacctcaagggatccacccacctcagcctcccaaagtgctgggattacaggtgtgagccaccacgcccagccagtcagcgcaattttaactgagattttcttttgtattaaaaaatgttttaagatggggtcttgctgtattggccaggctggtcttggaactcctggcttcaagcaatcctcccaccttgaccttccaaagtgctgggatgacaggcgtgagccacctcgcctggccagggaaacagcttttcagcctgcaagtagtgcagtcgggactcgtgaaaggaacttgagggaggatggtcccctggttgcataaggctttgcagagccttggccttcgctctgagtgagtctggggctttcggaaaccaaggcatagcttctcacaggaccctgcagctggcgtagagagcagactccaaagggggtaccactgggagggagtggacggggagaggaggttggattctggatgttgtttgaaggcagagctgccaggatttgttgagaccggatggaggcgatgactctgtagtttttggctggaactggaaggatggagtttcggattgccagctttgtgtctttgtgcagccatccactgtgtcgtggagagcaggctcttgagcgctgagtcctgagtgaatgactcgtgcaggcggggaggggagctagggttggccttggacccctgggagtgcctagggagagtcaccacttctcgctgcaggagcccagggagactcaaaagtgttgacttttgagctgccagaggaggagaaggggctaccccggctgggggacaggagcaagaagattccaggcagggagaagcaggaacaggggtgagggaagggaagggccatggcagaaaacccaggagacagggaagctggaggtgcagcaggtgcagagaggcctcctaggtgaggctgatctgtaggggccccatgaggaagaaacatttcctgtccccaactcacctggtgacatcaccccatcttctcatacactacagttgaaccacatgagccttttttgttggtttgtttttgtttttgagacggagtcttgctctgttgcccaggctggagtgctgtggtgcaatctcggctcactgcaacctctgcctccctggttcaagcgattctcctgcctcaggctccctagtatccctagtagctgggactacaggcgcgcgccaccatgcctggctaatttttgtatttttagtagagacaggttttcgccatgtcggccaggctgatctcgaacttcttacctcaagtgatccacccgccccggcctcccaaagtgctgggattacaggtgtgagccaccgcgcccggccgaccatgcaagcttttctgacggttcctgaaaccaccgagttggttctaccccaggaccgacgcacactctgtccctgctgcatggaattcttccctctggtcttgacatgactgggaaggcttgcgtgcgcatgtcgccctctgtcgtccaccattgtccccatcttgcaaggccaagaggaggttctccactaagggcacatggccagtgggactccagtgtccctgctcttcacggcgccagcaaccccgttccctgtgccgcctcgctcgcctggtcctttcgtgctccccagcactggcctcctggagcccagggccaccagtgacgctttggtctctagtcctttccagtgcctcttccttcccccagacaccagtgagaacagggcctgccgtgtgccggtcagggctgagctctcgagtctcttgccaccaacagctccgacttgacccagggtgtctctacctccaggcggctctgtgacctccggcaagtggttccagcccttctgggcttcagtctcctcatctgtcacttgggcacaatagaagcaactacctcccagtgaaggagtccatgagagggcccgacttctcggcctcagcactgggccacatgcacagtcaccacttgctccactctggcatctccatggggacaatgcccgcaggcacccccatttcacagataaggaaagcgaggcccaggggtgaaatcagttgcccagggtgacacagccaggaagcagaggagctgggatttgaatggaagcttaattcaggagcccgtgagcctccccagcccctcccaatggtgacagctccttttctgcttcactctgagcacctcatgtgtgcccagccctgggctgggacacagcagtgaccgagacagcccattcctgccctcatgggggtcccaggtcaggcacagtggctcacacctgtaatcccagcactttgggaggctgaggtgggcggatcgcttgagatcgggagttcaagatcagcctgggcaacatagcaataccctgtctctacaaaaaaaattagaaattaggcatatggtggtacatgcctgtagtcccaactactggggacgctgagctggcagggcacatgcctatagtcccagctacttgggagcctgggaagggggagtggttctattctgaagctgaggccaagccatccaaggccttgcaggtgtgctgaggaacccatatcttctcagggcacgagggagccatggcaggttctgggcagggggtcaacagggtcaggtttgtgctttaacatgatccctctgtctgctgtctgtgaggtcacttgaagttggggcatgagactagagaggaggctgtgggtagagaaactgggggggtggcccaggagatgggaaggatggttagaaagatacttgagggtctcatggcctcagttccaacagtccctggaactcagaggccagagattctaagtcactcactctagatggctgcttttccctctgggcttcagtctcccccttgattgaatgaggggataacactgaccagagtggtaatggtagtgattttttttttcttttcttcccctgccccacctcacatacctctgccctgagacgcagtctctgttgcccaggccagagtgcagtggcacagtgtcagctcacctcaacctccaccttctgggttcaagtgattctcctgtctcagcctcccaagtagctgggattacaggcacgcactgccacacccggctaatttttgtatttttgcgtcgtggcacatgcgtgtaatcccaggtactcgggaggctgaggcaggagagtcacttgaacccgggaggcagaggttgcagtgagccgagatgacgcctttgcactccagcctgggcaacaagagcaaaacgccccatctcaaaaaaaaaaaaaaagagagagagagggagagatgggggtctcgccatgttgccccagctggtctcagactcctgggctcaaacaaccctcctgcctcagcctcccaaagtgccaggattacaggcgtgagctactgtgccccgcccgtgtgatggtgattcaacaaccagtggggggttcggggattcatttgcttcatctcctctgggaaggagagtcacacagtcgcttgcccgagcccatggggaccagctgcagcctacttctgatctcagcctccccagaagatgccaccagggcactggccatgaactcacggcctctctcacacccaccaggctcatcttgggggttgccgcctaacactcagcccctctgagagctccacccagccatgcctgcaggtatgaaaggcccctattcctgcagctccagagagctggctccaggctggctccatgctagcaggccagcctgctcccactgtggggcccctagtctgcccctctggtcatcttggtctgggaagcatcttcgcacctgctttgctctgtgctgtctcagcttctctgtgtgccctcagtctcgtggcccccaacctcccttcccttctccacgtgtcttcctctccagggctgcaccctaggagattgctcgatcgtggtggatttctcaactgtgaatcttcagtccctcttcccccttcatttctgtctctgcagatgtgttgtttctttttttttttttcttttttttttttttttgtctttttgagatgaagtcttgcactgtctcccaggctggagtgcagtggcacaatcacaatctcagcttactgcaacttccgcctcccgggttcaagcgattctcctgcctcagcctcctgagtagctgggactacaggtgtgcaccaccacactcagctaatgtttgtatttttagtagagacagggtttcaccatgttggccaggctggtctcgaacctccgacctcagacgatccacccacctcagcctcccaaagtgctggaattacaggtgtgagccaccgtgcccagcctctttttttctttaaaaattttttaggccgggcgcggtggctcatgcttgtaatcccagcactttgggaggccgaggcaggcggatcacgaggtcaggagatcgagaccacggtgaaaccccttctctactaaaaatacaaaaaattagccaggcatggtggcgggctcctgtagtcccagctactcggagaggctgaggca[137 bp omitted]atctctgttgcccacgttggagtgcagtggcgtgatcatagctcagtgtaaccttgaccttctgagctcaagtgatcctcctgcctcagcctcccaagtagctgggactataagcatgtgccatcatgcctggctacgtttttaaatttatttatttgttgtttgtttgcttattgggacagattctcactctgtcactcaggctggagtgcagtggcactatcatggctcactgcagcctccacctcctgggcttaagcaatcctcccacgtccacccccttagtacctgggactacaggtgtgcaccacctcacccaactaatttttgtattcgctatgtttcccaagctggtttcgaattcctgggctcaaatgaacccactttggcctcccaaactgctgggattacaacaagcatgagccactgtgcctggccttgatttttttttttttttttatgataatctgtagttagatgaagtttttaaattttttgtagagatggggtctcactatgtcacctaggcttgtctccaactgctgacctcaagctgtcctcttgccccagccctccaaagcattgggattactggcatgagccattgcatctggctttttttttttttttttttttttttttttttttttgagatggggtctcaccatgttgcccgggctggcttcgaatgcctaggctcaagcaatcctcccttctcagcctcccaaatagctgggattacaggcacgtgccaccacgccaggcttgttttctttccctgtccctccctctctatttcccactctcttcctccccaattcttctggccctataaaatcacatttgtggcctgtaccctgctaggctcgaaagacaccaaagtgaatccatctccatcctgaggcttgaaaaggcagcccaaaggtggcagttctcttgttcagcaagcactccctacggtggagggacacaggaacgcagacttggacctcagtgcagcaagtcccagccacagctgagcactcgattcctcacaaccccaagaggcagttaggttcacagagagatgatgccagcgtccatggtcaccagccagcctgtggcagggctgggattcgaacccaggctgtgcatatttacccactctacccaatggcctctcagcagcagagtggctcagagcctgggtttgggaggtgtggaggcttggattctgcccttgacacattttgtgagcatgagtgagtgacttaccctgtaagcttctataagtggtggtgaccccctctgtaagtgggggtggataaatgctgaccacatgggcttgtgtcgaccagatgaggtccttcaggtaatgcagtcatagcagggcctgggacgctgacctcagcggtagggaacccctgggcgatgggttaggagaaaggagcccttgagggaggcctgagagcaagcccaagcctccagccggggtgagcctagagggcttcctggaggtggagtctagcctggcactcagggtgggtggaaactgatcgtcattttgcccacaggaatcctcgtagcccactacctccagagcatcacgccttgcctggccctgggtggagagctggtctaccaccggcggcctggagaggagggcactgtcatgtctctagctgggaaatacacatgtgagcctggcgcctgggtccgagggtggaggggctgggcccctggactcctcctgggtctgagggaggacgggctagggccctggacactcaggtctgagggaggaggcctgggttcccagatgcccaaatccccttggtaatgagaccccgcctccaccccactctctgacagtgaacaactggttggcaacggtaacgttgggccaggcgggcatgcacgcaacatactaccacaaagccagtgaccaggtgagtgggtgcagggactagctggtgctgccaggggctgctgggcctggaagtccaggtggggccacttgctaattctcatgtgttgctccggcccctccagctgcaggtgggtgtggagtttgaggccagcacaaggatgcaggacaccagcgtctccttcgggtaccagctggacctgcccaaggccaacctcctcttcaaaggtaaaggtctcggttcccctacgcgggaaacaggcaggaggtgactcaactctgagtggatgtgtgggccaccacaggtgctggaggacagtgtgctgccaccct[143 bp omitted]actccgtctctactaaaaatacaaaaacaaaattagccgggtgtggttgcgggtgcctatagtcccaactactgaggctgaggcgggaaaatggtatgaacccaggaggcggagcttgcggtgagccgagatcgtgccaccgcactccagcctgggtgacagagcaagactccatctcaaaaaaaaaaaagtaggtggacaaccctctactatgttttatgcttggaaaaaaaaagtaggtagagcagccaggcgtggtgactcacgcctgtaatcccagcattttgggaggccaagccaggtagaatacttgaggccaggagttggagaccagcctggccaacgtggtgaaatcccctctctactaaaagtacaaaaattagccaggtgtggtagcgtgctgcaactgtagtccccgctacttaggaggctgaggcacaagaatcacttgaacctgggaggcggaggttgcagggagttgagactgcaccactgcactccagcctgggtgacagagtgagactccatctccaaaaaaaataaaatgaaataaataaataaatgttaaaaaaaatctggtggagcatctgatgggtgtttgggccaagctggagctttgtccatcccctcttatttttctgcacttgactctcttatttttctgagactggtctccctctgtcgcccaggctagagtgcagcagtgcaactgcggctcactgcagcctccacctcccgggctcaagcagccttcccacctcagcctcctgagtagctaggaccacaggtgtatgccaccaggcccagctaatttttttgatagttttgggagacatgggggtttcaccatgttgcccaggctggtctcgaactcctggactcaagccttggcctcccaaagtgctgggattataggtgtgagccaccacacccagccagggtagaaggcactttggaagcctcgagcctgccccattcatcttacgttagtggaaactgaggcttccagaggtttcaaggtcacaactaaatccagaacctcatctcaggcacactggtcgtagtcccaatgtccagtcttaagtcttcttggatatctgtggctcacagattttgggtgtttgagcctcctgctgagcactgctggggccacagcggtgaccagccctgtcttcacgggactcagtgagaggaacagattcatccgcagagtgggcaggactaggttgggggaacccaggggtctagagggcttttcagagggcaggggtcactgagcggagagcagaggaggagtgagccatttgctccagcgtgaagttgttggtgtgatggggtttcagggtggcaggagcagtgtggttaaaggtctggaagctgtcggcatgtggctggtatccaaggtggccaggaactctgcatggatatggtgggaagctggcacgcctctcacctcagctcttccctgcaggctctgtggatagcaactggatcgtgggtgccacgctggagaagaagctcccacccctgcccctgacactggcccttggggccttcctgaatcaccgcaagaacaagtttcagtgtggctttggcctcaccatcggctgagccctcctggcccccgccttccacgcccttccgattccacctccacctccacctccccctgccacagaggggagacctgagcccccctcccttccctccccccttgggggtcgggggggacattggaaaggagggaccccgccaccccagcagctgaggaggggattctggaactgaatggcgcttcgggattctgagtagcaggggcagcatgcccagtgggcctggggtcccgggagggattccggaattgaggggcacgcaggattctgagcaccaggggcagaggcggccagacaacctcagggaggagtgtcctggcgtccccatcctccaaagggcctgggcccgccccgagggggcagcgagaggagcttccccatccccggtcagtccaccctgccccgtccactttcccatctcctcggtataaatcatgtttataagttatggaagaaccgggacattttacagaaaaaaaacaaaaaacaacaaaaaatatacgtgggaaaaaaaacgatgggaggcctccgttttctcaagtgtgtctggcctgttttgagcatttcatccggagtctggccgccctgaccttcccccagccgcctgcagggggcgccagagggccggagcacggaaagcagcggatccttgatgctgccttaagtccggctcagaggggcgcagcgtggcctggggtcgctatcttcccatccggaacatctgccctgctgggggacactacgggccttcccttgcctgagggtagggtctcaaggtcacttgcccccagcttgacctggccggagtggctatagaggactttgtccctgcagactgcagcagcagagatgacactgtctctgagtgcagagatgggggcagggagctgggagagggttcaagctactggaacagcttcagaacaactagggtactaggaactgctgtgtcagggagaaggggctcaaggactcgcaggcctgggaggaggggcctaggccagccatgggagttgggtcacctgtgtctgaggacttggtgctgtctggattttgccaacctagggctggggtcagctgatgcccaccacgactcccgagcctccaggaactgaaaccctgtctgcccccagggtctggggaaggaggctgctgagtagaaccaaccccaggttaccaaccccacctcagccaccccttgccagccaaagcaaacaggcccggcccggcactgggggttccttctcgaaccaggagttcagcctcccctgacccgcagaatcttctgatcccacccgctccaggagccaggaatgagtcccagtctctcccagttctcactgtgtggttttgccattcgtcttgctgctgaaccacgggtttctcctctgaaacatctgggatttataacagggcttaggaaagtgacagcgtctgagcgttcactgtggcctgtccattgctagccctaacataggaccgctgtgtgccagggctgtcctccatgctcaatacacgttagcttgtcaccaaacatacccgtgccgctgctttcccagtctgatgagcaaaggaacttgatgctcagagaggacaagtcatttgcccaaggtcacacagctggcaactggcagagccaggattcacgccctggcaatttgactccagaatcctaaccttaacccagaagcacggcttcaagcccctggaaaccacaatacctgtggcagccagggggaggtgctggaatctcatttcacatgtggggagggggctcccctgtgctcaaggtcacaaccaaagaggaagctgtgattaaaacccaggtcccatttgcaaagcctcgacttttagcaggtgcatcatactgttcccacccctcccatcccacttctgtccagccgcctagccccactttcttttttttctttttttgagacagtctccctcttgctgaggctggagtgcagtggcgagatctcggctcactgtaacctccgcctcccgggttcaagcgattctcctgcctcagcctcccaagtagctaggattacaggcgcccgccaccacgcctggctaacttttgtatttttagtagagatggggtttcaccat[134 bp omitted]ctttctttctgggatccaggagtccagatccccagccccctctccagattacattcatccaggcacaggaaaggacagggtcaggaaaggaggactctgggcggcagcctccacattccccttccacgcttggcccccagaatggaggagggtgtctgtattactgggcgaggtgtcctcccttcctggggactgtggggggtggtcaaaagacctctatgccccacctccttcctccctctgccctgctgtgcctggggcagggggagaacagcccacctcgtgactgggggctggcccagcccgccctatccctgggggagggggcgggacagggggagccctataattggacaagtctgggatccttgagtcctactcagccccagcggaggtgaaggacgtccttccccaggagccggtgagaagcgcagtcgggggcacggggatgagctcaggggcctctagaaagagctgggaccctgggaacccctggcctccaggtagtctcaggagagctactcggggtcgggcttggggagaggaggagcgggggtgaggcaagcagcaggggactggacctgggaagggctgggcagcagagacgacccgacccgctagaaggtggggtggggagagcagctggactgggatgtaagccatagcaggactccacgagttgtcactatcatttatcgagcacctactgggtgtccccagtgtcctcagatctccataactggggagccaggggcagcgacacggtagctagccgtcgattggagaactttaaaatgaggactgaattagctcataaatggaacacggcgcttaactgtgaggttggagcttagaatgtgaagggagaatgaggaatgcgagactgggactgagatggaaccggcggtggggagggggtggggggatggaatttgaaccccgggagaggaagatggaattttctatggaggccgacctggggatggggagataagagaagaccaggagggagttaaatagggaatgggttgggggcggcttggtaaatgtgctgggattaggctgttgcagataatgcaacaaggcttggaaggctaacctggggtgaggccgggttggggccgggctgggggtgggaggagtcctcactggcggttgattgacagtttctccttccccagactggccaatcacaggcaggaagatgaaggttctgtgggctgcgttgctggtcacattcctggcaggtatgggggcggggcttgctcggttccccccgctcctccccctctcatcctcacctcaacctcctggccccattcaggcagaccctgggccccctcttctgaggcttctgtgctgcttcctggctctgaacagcgatttgacgctctctgggcctcggtttcccccatccttgagataggagttagaa[137 bp omitted]gcctcagcctcccaagtagctgggactacaggcacatgccaccacacccgactaacttttttgtattttcagtagagacggggtttcaccatgtt[144 bp omitted]acggggcagctgtgatctttattctccatcacccccacacagccctgcctggggcacacaaggacactcaatacatgcttttccgctgggcgcggtggctcacccctgtaatcccagcactttgggaggccaaggtgggaggatcacttgagcccaggagttcaacaccagcctgggcaacatagtgagaccctgtctctactaaaaatacaaaaattagccaggcatggtgccacacacctgtgctctcagctactcaggaggctgaggcaggaggatcgcttgagcccagaaggtcaaggttgcagtgaaccatgttcaggccgctgcactccagcctgggtgacagagcaagaccctgtttataaatacataatgctttccaagtgattaaaccgactcccccctcaccctgcccaccatggctccaaagaagcatttgtggagcaccttctgtgtgcccctaggtactagatgcctggacggggtcagaaggaccctgacccaccttgaacttgttccacacaggatgccaggccaaggtggagcaagcggtggagacagagccggagcccgagctgcgccagcagaccgagtggcagagcggccagcgctgggaactggcactgggtcgcttttgggattacctgcgctgggtgcagacactgtctgagcaggtgcaggaggagctgctcagctcccaggtcacccaggaactgaggtgagtgtccccatcctggcccttgaccctcctggtgggcggctatacctccccaggtccaggtttcattctgcccctgtcgctaagtcttggggggcctgggtctctgctggttctagcttcctcttcccatttctgactcctggctttagctctctggaattctctctctcagctttgtctctctctcttcccttctgactcagtctctcacactcgtcctggctctgtctctgtccttccctagctcttttatatagagacagagagatggggt[131 bp omitted]tctgccctctgcatctgctctctgcatctgtctctgtctccttctctcggcctctgccccgttccttctctccctcttgggtctctctggctcatccccatctcgcccgccccatcccagcccttctccccgcctcccactgtgcgacaccctcccgccctctcggccgcagggcgctgatggacgagaccatgaaggagttgaaggcctacaaatcggaactggaggaacaactgaccccggtggcggaggagacgcgggcacggctgtccaaggagctgcaggcggcgcaggcccggctgggcgcggacatggaggacgtgtgcggccgcctggtgcagtaccgcggcgaggtgcaggccatgctcggccagagcaccgaggagctgcgggtgcgcctcgcctcccacctgcgcaagctgcgtaagcggctcctccgcgatgccgatgacctgcagaagcgcctggcagtgtaccaggccggggcccgcgagggcgccgagcgcggcctcagcgccatccgcgagcgcctggggcccctggtggaacagggccgcgtgcgggccgccactgtgggctccctggccggccagccgctacaggagcgggcccaggcctggggcgagcggctgcgcgcgcggatggaggagatgggcagccggacccgcgaccgcctggacgaggtgaaggagcaggtggcggaggtgcgcgccaagctggaggagcaggcccagcagatacgcctgcaggccgaggccttccaggcccgcctcaagagctggttcgagcccctggtggaagacatgcagcgccagtgggccgggctggtggagaaggtgcaggctgccgtgggcaccagcgccgcccctgtgcccagcgacaatcactgaacgccgaagcctgcagccatgcgaccccacgccaccccgtgcctcctgcctccgcgcagcctgcagcgggagaccctgtccccgccccagccgtcctcctggggtggaccctagtttaataaagattcaccaagtttcacgcatctgctggcctccccctgtgatttcctctaagccccagcctcagtttctctttctgcccacatactggccacacaattctcagccccctcctctccatctgtgtctgtgtgtatctttctctctgcccttttttttttttttagacggagtctggctctgtcacccaggctagagtgcagtggcacgatcttggctcactgcaacctctgcctcttgggttcaagcgattctgctgcctcagtagctgggattacaggctcacaccaccacacccggctaatttttgtatttttagtagagacgagctttcaccatgttggccaggcaggtctcaaactcctgaccaagtgatccacccgccggcctcccaaagtgctgagattacaggcctgagccaccatgcccggcctctgcccctctttcttttttagggggcagggaaaggtctcaccctgtcacccgccatcacagctcactgcagcctccacctcctggactcaagtgataagtgatcctcccgcctcagcctttccagtagctgagactacaggcgcataccactaggattaatttgggggggggggtggtgtgtgtggagatggggtctggctttgttggccaggctgatgtggaattcctgggctcaagcgatactcccaccttggcctcctgagtagctgagactactggctagcaccaccacacccagctttttattattatttgtagagacaaggtctcaatatgttgcccaggctagtctcaaacccctgggctcaagagatcctccgccatcggcctcccaaagtgctgggattccaggcatggggctccgagcccggcctgcccaacttaataatacttgttcctcagagttgcaactccaaatgacctgagattggtgcctttattctaagctattttcattttttttctgctgtcattattctcccccttctctcctccagtcttatctgatatctgcctccttcccacccaccctgcaccccatcccacccctctgtctctccctgttctcctcaggagactctggcttcctgttttcctccacttctatcttttatctctccctcctacggtttcttttctttctccccggcctgcttgtttctcccccaacccccttcatctggatttcttcttctgccattcagtttggtttgagctctctgcttctccggttccctctgagctagctgtcccttcacccactgt[137 bp omitted]acctccacttcccagattcaagcaattctcctgcctcagcctccagagtagctgggattacaggcgtgtcccaccacacccgactaatttttgtatttttggtagagacaaggcttcggcattgttggccaggcaggtctcgaactcctgacctcaagtaatctgcctgcctcaccctcccaaagtgctgggattacaggcatgagccacctcacccggaccatccctcattctccatcctttcctccagttgtgatgtctacccctcatgtttcccaacaagcctactgggtgctgaatccaggctgggaagagaagggagcggctcttctgtcggagtctgcaccaggcccatgctgagacgagagctggcgctcagagaggggaagcttggatggaagcccaggagccgccggcactctcttctcctcccaccccctcagttctcagagacggggaggagggttcccaccaacgggggacaggctgagacttgagcttgtatctcctgggccagctgcaacatctgcttgtccctctgcccatcttggctcctgcacaccctgaacttggtgctttccctggcactgctctgatcacccacgtggaggcagcacccctcccctggagatgactcaccagggctgagtgaggaggggaagggtcagtgtgctcacaggcagggggcctggtctgctgggcctgctgctgattcaccgtatgtccaggagctggagcagcaccctctcagagcctcagtttccccagatgtcaatgagagaatcagcatcagccacatctcccacctgaagaatcgaaccttgagttctcacctttaagaatttttttttttttttgagacagtgccttgctcagtcgaccacgctggagtgcagtagcacgatcatcaatcactgcagcctccaactcaagcaaccctcctgcctcaacctcctgagtagctggggccacaggcacccaccaccatgcctggctaattctttcttttttgagatggagtctcactctgtcgcccaggctggagtgcagtggcaccatcttggctcaccgcaacctctgccccccgggttcaagcaattctcctgcctcagcctcctgagtagctagaattacaggcgcacaccaccacaccaggctaatttttgtatttttagtagaaacgaggtttcaccacggtggtcaggttggtctcaaactcctgacatcaggtgatccacccgcctcggcctcccaaagcactgggattacaggagtgagccaccatgcctggccatattttaaacttttttgtagagatggggtcttactatgttgcccaggctgatctcaaactcttgggctcaagcagatcctcctgccaaagcttcccaaagtagttggattacaggtgtgagccaccacgccccaccaacctatgaagatgtctaagcagacagggtgccctatctcaccacatccccagtcagatccagaggtgggacaaggatgggaaggaggttccagaacaaaggctggcagggagtcgtatgggacaggagctgacccagcaaccatccacagagacatcctggagcctgggaaggagaaggacaaagagcccccttttttaaattttttttatgtttttgagacggagtctcactctgtcacccaagctggagtgcagtggcacaatcttggctcactgcaacctccacctcatgggttcaaacgactctcctgcctcagcctcctgagtagctgggaccacaggtgcacaccaccatgcctggataatttttgaatttttggtagagacggagtttcaccatgttggccaggcaggtctcgaactcctgacctcaagtgctccgcccaccttggcctcccaaagttctgggaatacaggcgtgagccactgcaaccagccagtagcccccatctttgcccctcgctgagccctactggatgttcttggttatgcgacagtttccccatctattaaagagaaacccctatagcagaggggaggatgaggttggaaaagcaggagcattgttatgctattcttgtggggtctgggaagcagacatctgggtggatgtttggggggtgctgggcttagttggggaagtaggggggcccctggggctgacagggactggaagctctgagctggccagagggatgttgcaatcctgccagggtcttgtctatgctgtccttttcacaaccatccccctactgccaggctgacacgtggttgcgggggcacaaggccagccaacctagagtctgaggctaggcggaggacaccctccccaccagctgccagggtcactggcggtcaaaggcagctggtggggaaggcattggactccagccttgggggacggatgtagtgatggtgggaagcaggcttggtgccaggaggggcgtcagagggtgaataaaagcagatagagtgtttgggggaggtagccagccaaagggggtgaggcccggtggaagggaagaagggacatacacgcagagctttgcagctgagggttttaattttttgagatggggtctctgtcccaccaggctggagtgcagtggcacaatcacagctcactgcagcctcgaactcctgggctcaagcaatcttcctacctcagcctcttgagtagctgggactacaggcatgcgccaccacgctcggctaatttttgaacttttttgtagagatgaggtctccctatattgcccaggctggtctcgaactcccaggctcaagtgatcctccctcttcagcttcccaaagtgctgggattacaggcatgagccaccatgcctggctaatgcaggtgaggtttttgcagtgtcatccagctaaggcgacccgttcccctcccaaaaaagggagactgagaaccatgaagttaagagcccagagaatatcacggtggtctggggtgcttcaagggctggtctggaataaattggaggtggcacgcagggtaggagcgccgggccaactgggagacccagcaacataaaggaaaagttgttggggctgaggaggcttgctgagagaggggaagtgagggaaagaggtgatctagggacacggtgtgaatgagggggggatgagatcacagggttattactgggagacccctgagggaagatggccacagggacaggacaaggctgtcttcttaagggaggagaccacccctcatattgtcttatgcccaatttctgcctccaaagaaagaaaaagtaaaaactaaaaggcagaaatgaaatccacaagcagacagcccgcgccacaccctgggcctggtggttaaagattgacccctgacctaatccgttaggttatctatagattacagacattgtatagaaaagcactgtgaaaatccctattctgttttgttccgatctaattaccggtgcatgcagcccccagtcacgcatcccctgcttgttcaatcgatcacgaccctctcacgtgcacccacttagagttgtgagcccttaaaaggaacagggattgctcactcggggagctcggctcttgagacaggaatcttgcccattccccgaacgaataaaccccttccttaactcagcgtctgaggaattttgtctgcggctcctcctgctacattctgagtggggaaagggactaaggtggtctgaggaccccacagagtcaggaagattgagaggtgagagtgctgaacggggaggggctttggggctaagggaagtgcccgggaccccacctgaccccaacgctcacgggacaggggcagaggagaaaaacgtgggtggacagagggaggcaggcggtcaggggaaggctcaggaggagggagatcaacatcaacctgccccgccccctccccagcctgataaaggtcctgcgggcaggacaggacctcccaaccaagccctccagcaaggattcaggttggtgctgagtgcctgggagggacacccgcctacactctgcaagaaactcaaaaagggagatgaggggatcgtgggagggaggtagggagggaggagggtgccactgatcccctgaacccctgcctctgcctccagagtgcccctccggcctcgccatgaggctcttcctgtcgctcccggtcctggtggtggttctgtcgatcgtcttggaaggtaaaagtgggatgggagaattgcggagttggagatttggaagagtgaaggtggctacaggcctggggtcccggcttagaggacctctgagagctccggggccccttctgggtcgtggttgcctcatcgtggtcgggtgggtctccaggttctcccaggctcagtcccgcaggcgccaaatctgcgcaggagagcactagcaaccgatgacgtattgaggcccacacctctgggattggctgtcctgcttcgacagccttgaaagtgggtaagctgggtggggggctctgggagaggtcagtgctgagtaaggcaattcccagcagcttgagccccaccaggtcactccagtattcctccccattctttttttttttttttttttttctcttgagacggagtctcgctctgtcgccgaggctggagtgcagtggcgcgatctcggctcactgcaagctccgcctccctggttcacgccattctcctgcctcagcaggactacaggcgcccgccaccgcgcccggctaattttttgtattttcagtagagaca[138 bp omitted]ccatcccggtatccc[136 bp omitted]acttcgtctctactaaaaatacaaaaaaattagccaggtgtggaggcacgcgcctgtaggcccagctactcgggaggctgaggcaggagaatcacttgaacccgggaggcggaggttgcagtgagccgagatcataccactgcactccagcctggctgacacagcaagactccgtctcaaaacaaaacaaaacaaaaatagctgggtgtggtggtgcacacctgtaatcccagctacttgggaggctgaggcaggagaactgcttgaacccgggaggtggtggttgcagtaggccgagatcatgccactgcactccagcttgggctacagagcaagactccatctccaaaaaaaaaaaaaaaaaaacaaattttgaacccctgcccatcttcctggcaggcccagccccagcccaggggaccccagacgtctccagtgccttggataagctgaaggagtttggaaacacactggaggacaaggctcgggaactcatcagccgcatcaaacagagtgaactttctgccaagatgcggttagaacccttcccagggcacgggagagctggggtgtgtttttgggtggagccctggcagatggtccaagatgaacagattgaaaaaaaaacaagtcctggagaggctgacaacatccctctggtcacacagctagatctcaaggtgctcagacttcaaggacagtttccctgactcccatccaggccatattttaaaagatggtcttgggctgggcacggtggctcatgcttgcaatcccagcacttagggaggccgaggtgggctgattgcctgaggtcaggagttcgagaccagtctgaccaacatggtgaaaccttgtctctactaaaaatacaaaaaaattaggcaggcatggtggcgtgcacctgtaatcccagctagtcgggaggctgaggcaggggaattgcttgaaccagg[138 bp omitted]tatgggaggctgagatgggaggattgcttgagcccaggagttcgagaccagcctgaccaacatggcgagatcctgtctccatttaaaaaaaaaaaaaaaaagatggttttgtgaggtaatgaaaatgaaggccccaagcttggccagacctgggtccccaggctggagtagcaccccttcctgtgtgatcttgacagaggggcattactgtgagcctcagtttcctctcctataaactggtggttctacagggaagtaaaggagcaggcctacagggtgtctggtacatgtagatgctcagtatatcatgaaacccacccttgccccctttggcaagttagagagtcattcgttctttcaaaaatatttactgagcatctgctaagtgctggaaactgtttcaatgtggggaataaaacagtgaagaacgtgccgagcacggtggctcacacctgtaaccccaccactttggaaggccgaggtgggtggatcacttgaggtcaggagtgcgagaaccccgtccctaatagaaatgcaaaaaaaattagctgggcatggtggcccatgcctgtagtcccagctccttgggaggctgaggcgagaggattgcttgagcccaggagatctaggctgcagtgcgccatgtttgtgccactgcattccagcctgggtaacagaatgagaccctgtctcaacaaaaaaagaaaagaaaagagaagaaaagagaaaagaaagacagggagggagggaggaaggaagggagggagggagggaaaatagagccaggcataaacttagaaagatcgtttggaggccaggcacaatggctcacacctgtaatcccagcactttgggaggccaaggcaagcagatcacctgaggtcaggagttcgagaccagcctaacatggagaaaccctgtctctactaaaaatacaaaattagccgggcgtggtggtgcattcctgtagtcctagctactcgggagcctgaggcaggagaatcacttgaacccgggaggcggaggttgcagtgagccgagatcatgccactgcactccagcctgggcgacaaggcgagactccatgccaaaaaagaaaaaaaactcctggcgcggtggctcacgccagtaatcccagcactgtgggaggctgagcaggcggatcacgaggtcaggagttcgagactagcctgctcaacataatgaaaccctctctgtactaaaaatacaaaaattagctgggtgtggtggcaggcacctgtagtcccagctactcgggaggctgaggcaggagaatggcttgaacctgggaggcagaggttgcagtgagccgagacagtgccattgcactccagtccaggtgacagagcgaaactccatctcaaaaaaaaaaggaaggcattggtagcaagagatggcaggccttgaaagccaggccagggtgaagtgtttcttttttttttttttttttttttctttttaaatttttttttttgagacggagtctcgctctgtcacccaggctggattgcagtggcctgatctcggctcactgcaagttccgcctcccgggttcatgccattctcctgcctcaccctcccgagtagctgggactacaggcacctgccaccacgccagctaattttttgtattcttagtagaatgtagaatttactt[153 bp omitted]gtggtgcgatctcggcttactggaacctccacctcccgggttcaggcaattctcctgcctcagcctcatgagtacttggaactacaggtgtgtgacaccacacatggtattttttgtatttttagtgaagatgacatttcaccatgttgcccaggttggtctcgaactcctgacctcaagtgatcagcctacctcggcctcccaaagtgttgggattacaggcgtgagccaaatgcccagccaagggtaaagtgtttagacttcaacgtgctttggtccatctgggaaactgaggcacagaagttggcccacccagcccagcggtcctcctaatcccacagacagtggggatggagattctgcaaggggaagaggtgggagtcaggtagcaggcagaatttggacagcctgggaggtagctgcacacagtgacccccttccttattcctccccacagggagtggttttcagagacatttcagaaagtgaaggagaaactcaagattgactcatgaggacctgaagggtgacatcccaggaggggcctctgaaatttcccacaccccagcgcctgtgctgaggactccctccatgtggccccaggtgccaccaataaaaatcctacagaaaattctctcctgagtgcttctttactctggggaaggggctgcgggagagggtaggggcttccagagagggcagggtctgcaggagagggcaggggctaaaccttaggtactcctcacaagccctccaatgccctatctacttgccctgtgctgaggatgttttaactccatggtctcaaaagagtcttcctaagaaccctgcaaactgggccttattaatcccataagggcattgaggcccagagaggtgaagttacttgtataaggtcacacagccaggaagtagagaactggaactagattgaaccctcagcctagcaatgtcactatgctacacttttcctagtgtggtctacccgagatgaggggctgaggtttttttttgtttttgtttctgttttgaggcagactcactctctcccccaggatggagtacagtggtgcgatctcagctcactgcaacctccacctcccaggttcaagagattatcctgcctcagcctcccaagtagctgggatttacaggtgtgcgccaccacacccagctaatttttgtatttttagtagagacagggtttcatcatgttggccaggctggtctccaactcctgggcttaagcaatcctcctgccttggcctcccaaagtattagaattacaggcgtgagccactgtgcctggctcttatgtaaaattaaaccacatacacatgagaaacaaccctatgtaattaagatttctttctttttttttttttttttaagagatggagtcacccaggctggagtgcagttgcacaatctccattcactgcagccttgcaacctccaccacctgagttcaagggattctcctgcctcagcctcctgagtagctgggattataggcatgtgccaccacgcccagctaatttttttgtatttttagtagagacggaatttccccatgttggccaggctggtctcaaactcctggccttaaatgatccacccgtcctggcctcccaaagtgctgggattacaggtgtgagccaccgcacccagcttaagatttcataagaaaaatatttgtaagccacatatctaataaccggttaatattcaggctgggtgaagtggctcatgcctgtaatcccagcactttgggaagacaaggcgggcggattacctgaagtcaaaagtttgagacctgcctggccaacatggtgaaaccctgtctctactaaaaatacaaaaaaattagccgggtggggtggcacatgcctgtaatcccagctgcttgggaggctgaggcaagagaatcccttgaacccaggagtcgaaggttgcagtgagccaagatggcgccactgccctccagcctgggagacagagtgggactccatctcaaaaaaaaaaaaaattcaaaatgtataatatacaatcctagttgggacatcaaacactgcagccactgtggaaaacagtatggggtttcctcaaaacattaaagatagaactctcaaatgatccttcaatcccacttctgggtatttattcaaaagaattgaaatcaggaccttgaagagatacctgccctcccatgttcactgcaggtctgctcaatacccaagatatggaaacaacctaaatgtttatcaacagatgaatgggtcaaggaaatgtggtctctacatgtaatggaatgtaacgcatccttaaaaaggaaaccctaaggccgggctctgtggctcacacatgtttttttttttaaattttatttatttatttatttatttatttattttttattgatcattcttgggtgtttctcacagagggggatttggcagggtcataggacaatagtggagggaaggtcagcagataaacaagtgaacaaaggtctctggttttcctaggcagaggaccctgaggccttccgcagtgtttgtgtccctgggtacttgagattagggagtggtgacgactcttaacgagcatgctgccttcaagcatctgtttaacaaagcacatcttgcaccacccttaatccatttaaccctgagtggacacagcacatgtttcagagagcacagggttgggggtaagatcacagatcaacaggatcccaaggcagaagaatttttcttagtatagaacaaaatgaaaagtctcccatgtctacttctttctacacagacacggcaaccatccgatttctcaatcttttccccaacttttcccccctttctattccacaaagccgcgattgtcatcctggccggttctcaatgagctgttgggcacacctcccagacagggtggtggccgggcagaggggctcctcacttcccagtaggggcggccgggcagaggcgcccctcacctcccggacggggtggctgccgggcggagaggctcctcacttctcagacagggcggttgccaggcagagggtctcctcacttctcagacggggtggccgggcagagacgctcctcacctcccagacggggtcgcggccgggcagaggcgctcctcacatcccagacggggcggcggggcagaggcgctccccacatctcagacgatgtgcggccgggaagaggcgctcctcacttcctagatgggatggcggccggacggagacgctcctcacttcccagactgggcagccaggcagaggggctcctcacatcccagacgatgtggctcacgcatgttatcccagcactttcggaggtca[135 bp omitted]agaatcgcttgaacccaggaggtggaggctgcagtgagccgagatcatgccactgcactccagccggggcatcagagcaagactcaatctcaaaacataaaaggaaatcctgaaactgggcacagtggcttatgcgtgtaatcccagcactttggaaggctgaggtgggaggatcacttgaggtcaggagttcgagaccagcctgggtaacatggtgagacaccatctctaccaaaaaaagaagaaagagaataaataaatgtataaatattactccctggggttaatgcatccccttctcccccaaatcaaccctccaaactcctatactctcctgtcttctcactcagcagcctgttagaactcaagtcagattttttgttttttgttttttgagacggagtctcactctattgcccagcctgtgcagtggcaccatctcagctcactgcaacctctgcctcccaggttgaaccgattttcctgctcagtctcccaagtagctgggactacaggcgtgtgtgtgccaccacacccagctaatttttgtatttgtagtagagacggggtttcaccatgttgcccaggttggtctcgaactcctgagctctagcaattagccctccttggcctcccaaagtgctggggttacaggcatgagccaccatggccggcctcaagtcagattatgctcttcctctgctcagaactctcctgattctctcagagtaaacccagaagcacttaccaaggcctacaaacgggacactatgccgtccacgatcgcctcctccctgtctctctctccatcactcacaagcaactctttgctattcctccaatgtactgggcaggttcccatctcagggcccttgcagttactgttcctcttgcctggaatgttcttccccaggggtccagatatctgcctggctccctcctcacttcctccagttctcttccaaaatcatcccctgccagacgtggtggcacacgcctgtaatcctaactctttgagatgccaaggtgggaggattgcttcagctcaggagttcaagatcagcctgggcaatagcaagaccccatccgttctaaaaataaaaataaataaaaaataaaaaataaaaattagctgagcatggtagtggacaccttggggttccagccacgtggcaggctgaggtaggaggatggctttgaatcagggaggttgaggctgcagtgagccatgttctgaattagatactggtgatgatcgtgcaaccttcccaatataggaaaaaccactgaacagtacattttcaaagggtaaatttagccggacacggtggctcatgtctgtaatcccagcacttttggagtccgaggc[131 bp omitted]gaggcaggagaattgcttgaacccgggaggcagaggttgtggtgagccgacatcacaccatcgtactccagcctgggcaacaagagcgaaactccgtctcaaaaaaaaaaaaaataattaagaaattagccaggcgtggtggtgggtgcctgtagtctcagctacttgggaggctgaggcatgagaatcgcttaaacccggcgggtggaggctacagtgagcctagattccaccaccgcactccagcctgggcaactgagtgagactccacctcaaaaaaataaataaaagggtaaattttatggaatgtgaatcataattcaatttttcaacatgcgttaggagggacatttcaaactcttttttaccctagactttcctaccatcacccagagtatccagccaggaggggaggggctagagacaccagaagtttagcagggaggagggcgtagggattcggggaatgaagggatgggattcagactagggccaggacccagggatggagagaaagagatgagagtggtttgggggcttggtgacttagagaacagagctgcaggctcagaggcacacaggagtttctgggctcaccctgcccccttccaacccctcagttcccatcctccagcagctgtttgtgtgctgcctctgaagtccacactgaacaaacttcagcctactcatgtccctaaaatgggcaaacattgcaagcagcaaacagcaaacacacagccctccctgcctgctgaccttggagctggggcagaggtcagagacctctctgggcccatgccacctccaacatccactcgaccccttggaatttcggtggagaggagcagaggttgtcctggcgtggtttaggtagtgtgagagggtccgggttcaaaaccacttgctgggtggggagtcgtcagtaagtggctatgccccgaccccgaagcctgtttccccatctgtacaatggaaatgataaagacgcccatctgatagggtttttgtggcaaataaacatttggtttttttgttttgttttgttttgttttttgagatggaggtttgctctgtcgcccaggctggagtgcagtgacacaatctcatctcaccacaaccttcccctgcctcagcctcccaagtagctgggattacaagcatgtgccaccacacctggctaattttctatttttagtagagacgggtttctccatgttggtcagcctcagcctcccaagtaactgggattacaggcctgtgccaccacacccggctaattttttctatttttgacagggacggggtttcaccatgttggtcaggctggtctagaactcctgacctcaaatgatccacccacctaggcctcccaaagtgcacagattacaggcgtgggccaccgcacctggccaaatttttaatttttttctagagatagggtcttactgtgttgcccaggctggtgtcaaactcctgggctcaagcagatcctcctgcctcagcttcccaaagtggtgggattataggtgtgagccactgcgcccagtcagtagccccctctttgcccctcactgagccctactggatgttcttggttgtgtgacagtttccccatctattaaacagaaacccctatagcagaggggaggatgaggttggaaaatcaggagcattgttattctattcttgtgggatcggggaagcagacatctgggtggatgtttggggaatgctgggctcagttgaggaagtaggggggcccctggggcttacagggactggaagctctgagctggccagagggatgttgcaatcctgccagggtcttgtctatgctgtccctttcacaaccatccccctaccgccaggctgacacgtggttgtgggggcacaaggccagccgaactagagtctgaggctgggctgaggacaccctccccatcagctgccagggtcactggcggtcaaaggcagctggtggggaaggaattggactccagccctgggggacggatgtggtgatggtgggaagcaggcttggtgccaggaggggcatcagagggtgaataagagcagatagagtgtttgggggaggtagccagccaaagggggtgaggcccggtggaagggaagaaggggcatacactcagagctttgcagctgaaggttttaattttttgagatggggtctcactctgtctcaccaggctggagtgcagtggcgcaatcacagctcactgcagcctcgaactcctgggctcaagcaatcttcctacctcagcctcttgaatagctgggactacaggtgtgcgccaccacgctcagctaatttttgaacttttttgtagagatgaggtctccctatattgcccaggctggtctcttaactcctgggctcaagtgatcctccttcctcagcttcccaaagcgctgggattacaggcatgagccaccatgcctggccaatgcaggtgaggtttttagtgtccagctaaggcgaccccttccctttgcaaaaaagggagactgaaaatcatcaagttaagagcccagagaatatcagggtggtctgggatgtttcaagggctggtctgaaagaaattggaggtggcacgcagggcagggttgcggggccaactgggaggccccagcaacataaaggaaaagttgttggggctgaggaggcttgctgagagaggggaagtgagggaaagaggtgatctagggacacggtgtgaatgagggggggatgagatcacagggttattactgggagacccctgagggaagatggccacagggacaggacgaggctgtcctctgagtggggaaaggagctatggtagtctgaggaccccccagagtcagggagattgggaggtgagggtgctgaatggtaaagggcttcggagctaagggaaatggtcaggaccccacctgaccccaacgcccacgggccaggggcagaggagaaaaacctgggtgggcagaaggaggcaatcttccaggggaaggctcaggaggagggagatcaacatcaacctgccccgccccctccccagcctgataaaggtcctgcgggcaggacaggacctcccaaccaagccctccagcaaggattcaggttgttgagtgcttgggagggacacccgcctccactctgcaagaactcataaagggagatgaggggatcgtgggagggagggaggagggtgccactgatcccctgaacccctgcctccgcctccagggtgcccctccggcctcgccatgaggctcttcctgtcgctcccggtcctggtggtggttctgtcgatcgtcttggaaggtaaaagtgggatgggagaattgcggagttggagatttggaagagtgaaggtggctacaggcctggggtcccggcttagaggacctctgagagctctggggccccttcttggtcgtggttgccccattgtggtcgagtgggtctccaggttcgcccaggctcagtccggcaggcgccaaatctgcccaggagagccctagtaaccgatgacgtatggatctccacacctctgggattggctgtcctccttttatagccttgaaagtgggtgatggggcgatgggctgtgggaggaggtcagtgctgagtaaggcaattcccagcggcttgagccccacgcggtcacttcagtatcctccccattctaaccacatgatccccaaggatctccttatctatccccgggatccc[136 bp omitted]accccatctctactaaaaatacaaaacagccaggcgttgtggtgcgcgcttggctacttgggaggctgagacaggagaactgcttgaacctaggaggcggaggttgcagtaagccgagatcgcaccatttgacacagcaagtctccgtctcaaaactacaacaacaacaacaacaacaaccaaattttgcacccctgcctcatcttcctggcaggcccagccccagcctagggggctccagaagtctccaacccctttgatggcctggaggagttaggaaagaccctggaggactacactcgggaattcatcaaccgcatcacacagagtgaacttcctgccaagatgtggttagaacccttcccagggcacgggagggctggggtgtgtttgtgtggagccctggaggatgtccaagatgaacagattgaaaaaaaaaacaagtcccagagaggctgacagcatccttctggtcacacagctagatctcaaggatctcagacgtcagggacagtttcccggactcccatccaggccacattttaaaagatggtcttgggctgggcgccgtggctcacacctataatcctaacactttgggaggcctaggcgggcggattgcctgagatcaggagttcaagaccagcctggccaacatggtgaaaccctgtctctactaaaagtacaaaaaattagcctgacatgggggtgtgcacctgtaatcccagctactcgggaggctgaggcaggggaattgcttgcaccagtaaggtgggggttacagtgagccaagattgcaccactgcactccagcctgggcaacaaagcaacattccgtcacaaaagaaaaaaaaaaaagatggttttgcttaggtacggtggctcacacctgtaatcccagcactgtgggaggattgctgga[139 bp omitted]ctccccagttcaagcaattctctgcctcagtctcctgagtagctaggattacaggcgcccaccaccacgcccggctaatttttttgtatttttagtagagatggggtttcaccatcttggccaagctggtcttgaactcctgaccttgtgatccacccgcctcagcctcccaaagtgctgggattacaggtgtgagccaccatgcccggtgatcctgtctctatttaaaaaacaaaacaaaacaaaacaaaacaaaaagcatacaagccagccccggtgcgatagctcatgcctgtaatcccagcactttgggaggctgagtcgggcagattacctgagatcgggggttcgaggccaagttgggcagatcacctgaggttgggagtttgagaccagcctgaccaacatggagaaactccgtctctattaaaaatacaaaattagtcaggcatggtggtgcatgcctctattcccagctacttgggaggctgaggcaggagaatcacttgaacctgggaggcggaggttgcagtgagctgagataatgccattgcactccagcctgggcaataagagcgaatccacgtctcaaaaaaaaaaaaaaaaattgaaaaaaaaaaagatggtcttgtggggtaatgaaggacacaagcttggtgggacctgagtccccaggctggcatagagccccttactccctgtgtgatcttaagagagaggcattactgtgagcctcagtttcctttcctgtgaaatggtggttctgtggggaagtaaagcagaaggcctatagggtgtctggcacattgtaaatgctcagtacatcttcaaatccacacttgctccctttggcaagttagagagtcattcgttcctcaacacatatttattgagcatctgctaagtgctagaaactgtttcaatgtggggaataaaacagtgaagaatatgccgagcgcggtggctcacacctgtaatcccagcactttggaaggctgaggtgagtggatcacttgaggtcaggagtttgagaaccccatctctactagaaatacaaaaaattacccaggcgtgatggcacacacctgtagtcccagctacttcggagacggaggcaagaggatcacttgagcccaggaggttgaggctgcagtgagctatgtttgtgccactgcattccagcctgggtaacagaatgagaccctgtctcatccaaaaaaaaaagaaagaaagaaagaaagaaagaaggaagggagggagggagggagggaaaatctagtcaggcctaaacttagaaagattgtttggaggccaggtgcagtggctcatgcctgtaatcccagcactttggcaggctgaggcgggcagatcacctgaggtcaggagtttgagaccagcctgaccaacaaggagaaaccctgtctcttctaaaaaaaaaatacaaaaaattagccaggcatggtggtgcatgcctgtaatcccagctactcaggatgatgaggcaggagaattgcttgaacctgggagctggaggttgcggtgagctgagatcgcgccattgcactccagcctgggcaacaagggcataactccgtctcaaaaaaagaaagaaagaaagaaagattgattgtttggagggagaggcaaaggtccaaagtcaagaaggtcgatcaataagcaagagcgggtggcatcccaggcaggggaacagcctgggcatacgcagggaggctggaaagtacctttgaatgagtaggggaacagatagggcaagggcaggctggaagaaagagtgggtagcaagagatggcaggccttgaaagccaggccagagtgaagttttcttttcttttcttttcttttgagacggagtcacgctctgttgcctaggctggaacacggtggtgtgatctcagctcattgcactctccacctcccaggttcaagcaattctcctgcctcagcctcctgagtagctgggattacaggcgtgcaccaccacgggtggctaatttttgtaatttagtaaagacggggttttgccatgttggccaggctggtctcgaactcctgacctccagtgatctgcctgcctcggcttcccaaagtgttgggattacaggcgtgagccaaatgcccagccaagggtaaagtgtttagacttcaacgtgctttggtccacctgggaaactgaggcacagaagttggcccacccagcccagcggtcctcctaatcccacagacagtggggatggagattcagcaaggggaagaggtgggagtcaggtagcaggtagaatttgaacagcctgggaggtagctgcacacagtgacccccttccttattcctccccacagggattggttttcagagacatttcggaaagtgaaggagaaactcaagactgactcatgaggacctgaagggtgacatcccaggaggggcctctgaaatttccaacaccccagcgcctgtactgaggacgccctccatgtgtgtccaatgtggtcacacgcccaggtgtgaccaataaaaatcctatggaaaattctctctggccaggcatggtggctgacgcctgtaatcccagcactttgggaggct[136 bp omitted]aggcaggagaatcgcttgaaaccgggaggtggagcttgcagtgagctgagatcgtgccactgcactgcagcctgggtgacaagagccagactccgcgtcaaaaaaaaaaaagaaaagaaaattctgtctgactgcttcttcactgtggggcaggggtgccggagagggtaggggctgtgggagagggcaggggctgaaccttacggactcctcacaagccctccaatgccccatctacttgccctgtgctaaggatgttttaactctatggtctcaaaagaatcttcctaagaaccttgcaaactgggacttaataatcccataagggcattgaggcccagagaggtgaggctacttgtataaggtcacacagccaggaagtggagaactggaactagattgaaccctcagccaggcaatgtcactatgctacacttttcctagtgtggtctacccgagatgaggggctgaggttttttgttttgttttgttttgttttgaaacagagtttcgctcctcttgcccaggctggagtacaatggcaccatctcagttcactgcaacctccgcctcccaggttcaagggagtctcctgcctcagcctcccaagtagctgggattgcaggtgcgtgccaccatgcctggttaatttttgtatttttagtagagacgaggtttctccatgttgatcaggctggtcttgaactcctgacttcacatgatctgcctgccatggcctcccaaagtgcagggattacaggcatgagccacctcgcctggcctttttttttttttcttgagacagagtctcactctgtaccccaggctggagtgcaggggcatgatctcggctcactgcaacctccgcctcctgggttcaacagattctcctgccttagcctccctagtatctgggattacaggtgtgtgccaccacacccagctaatttttgtatttttagtagagacagcattttatcgtgctggccagtctggtctccaactcctggattcaagcagtcctcctgccttggcctcccaaagtggtgggattacaggcgtgagccactgtgcccagctcttacgtaaaattaaaccacatgcacatgcaaaacaaccctatgtaaaaaaaaaattttttttgagatggagtctggctctgtcacccaggctgaagtgcaatgatgcgatctccactcactgcaacctctgcctcccaaattcaagtgatttttttgccttagcctcctaagtagctgggattacaggcatgtgccaccacacctggctacttttgttgtatttttagtagagacagagtttcaccatgttggccaggctagtctcgaactcctgacatcaagtgatccgcccgccttggcatcccaaagtgttgggactacaggtgtgagccactgcgcccagcttaagattgcataagaacaatatttgaaagccatatatctaataaggggttaatattcaaaatatataagggactcctacaatgcgagtgggaacaccaaacactgcagccactgtggaaaacagtatggggtttcctcaaaacattaaaaatagaactaccaaatgatcctgcaatctcatttctgggtatttattcaaaagaattgaaatcaggaccttgaagagatacctgccctcccatgttcactgcaggtctgcttaatacccaagatatggaaacaacctaaatgtttatcaacagatgaatgggtcaaggaaatgtggtctatacgtgcaatggaatgtaaagcatccttaaaaaggaaaccctgaggccgggctctgtggctcacacatgttatcccagcactttcggaggtcgaggcaggaggatcacttgaggccaggagttggagaccatcctggccaacatggtgaaaccccgtatctactaaaaatacaaaaaaaatcagccaggcatggtggcgggtgcctgtaaacccagctactcaagaggctgaggcaggagaatcactggaacccaggaggcggaggctgcactgagcagagatcgtgccgttgcactccagcctgggcgacaagaacaaaactccatctcaaaaaataaaaaaaggaactcctgaagccaggctcggtggctcccacctgtaatcccagcactttgggatgccaaggcaggaggatcactcgaggccaggagttggagactatcctgtccaacatggtgaaaccctatctctactaaaaatgcaaacattagccaggcatggtggcgtgtgcctgtaatcccagctacttgggaggctgaggcgtgagaatagcttgaaccaggaggtagagactgcagtgagctgagatcatgccactgcactccagcctgggcgtcagag[138 bp omitted]aacactgtctctactaaaaatacaaaaaattagctgggcatg[135 bp omitted]aggagaaaaaaaaaaaaaaaaaaggaaatcctgaacctgggcatagtgtcttatgcctgtaatcccagcactttggaaggctgagatgggaggatcagttgaggtcaggagttcaagaccagcctgggtaacatggtgagacaccgtctctaccaaaaaaagaagaaagaaagagaataaataaattataaatattactctctggggttaatgcattcccttctcccccaaaatcaaccctccaaactcctatactctcctttcttctcactcagcagcctgttagaactcaagtcagattttttgtttttttgttttttgaggcggagtctcactctgttgcccaggctggagtacagtggcaccatctcagtccactgcaacctctgcctcccaggttcaagcgattctcctgctcagcctcccaattagctgggactacaggtgtgtgtgtgtcaccacacccagctaatttttgtatttgtagtagagacggggtttcaccatgttgcccaggctggtctcaaactgcccagctctagcgatctaccctcctcggcctcccaaagtgctggggttacaggcatgagccaccgtgcccagcctcaagtcagattatgctcttcctctgctcagaactctcctgattctctcagagcaaacccagaagaacttaccaaaggcctacaaacaggacactacccggttcacgatcgcctcatccctctctctccatcactcacaagcaactccttgctattcctccaatgtactgggcaggttcccacctcagggcccttgcagttactgttcctcttgcctggaatgttcttccccaggggtccagatatctgcctggctccctcctcacttcctccagttctcttccaaaatcatcccctgccagacatagtggcacactcctgtaatcctaacctttgagaggccaagatgggaggattgcttcagctcagaggttcaagaccagcctgggcaacatagcaagaccccatccctcctaaaaaaaattagctgggcatggtggtgcacacttgtggttccagccacttgggaggctgaggtaggaggatggctttgaatcagggaggttgaggctgcagtgagccatgttccaaattagatagtggtgattgtgcaaccttgccaata[137 bp omitted]aacatggtgaaactccatctttacgaaaaattaaaaaattagccaggcgtggtggcaagtgcctgtagtctcagctacttgggacgctgaggcgggagaatttcttgaacctgcggggcagaggctacagtgagctgagattgccccactgcactccagcctgggcaacagagtgagactccatctcaaaaaaaaaaaaaaaaaaaaagaaaaagaaaaaagggtaaattttatggaatgtgaattataactcaatttttcaacatgcattaggagggacatttcaaacccttttttaccccagccttccctgcaatcacccagagtatccagccaggaggggagtggctagagacaccagaagattagcagggaggagggtgcagggtttcgggggatgaggggatgggattcagaccagggtaaggatccaggggtagagagaaagatttgagagtggttttggggcttggtgacttagagaacagagttgcaggctctgtttttgggcccgccctgcccccttccgacctcttagttcctatcctccagcagctgtttgtgtgctgcctctgaagtccaccctgaatgaccttcagcctgttcccgtccctgatatgggcaaacattgcaagcagcaaacagcaaacacatagccctccctgcgtgctgaccttggagctgcggcagaggtcagagacctctcagggcccataccacttccaacatccccttgatctcttggattttggtggagaggggcagaggttgtcctggcctggttaggtagtgtgagagggtcccggttcaaaaccaccacttgctggttgaggagtcgtcagtaagtggctgcgcccccaccctgaggcttgtttctccatctgtacaatggaaatgatgaagatgcccacctgatagggtttttgtggcaaataagtaagtagtttttttgtttttctttttctttttttttttttttttttgagatggagtctcactctgtcaccaggctggagcgcagtggcgtgatctcggctcactgccaactccacctcccgggttcaagcgattctcctgcctcagcctctgagtagctaggactacaggcgcccgccaccacacccagctaatttttgcatttttagtagagatggggtt[133 bp omitted]agctctgtcacccaggctagagtgcattgagccatcttggctctctgcaacttctgcctcccgggttcaagcaattctcctgcctcaggctcccaagtagctgggattacaggcgcccacaaccatgcctggctaatttttgtatttttagtggagacagagtttcactatattggccaggctgatctcgaactcctgacctcaagtgatctgcctgtgtcagcctcccaaagtgctgtgattacaggcatgagccaccatgccccaccgcaattaagtaaagtaatcatctaaaagccctgccatggttcctgccacacagtgtgtgctggggaagcgcgcacgaattaaacagtagctggcgttgacggggcacctatgcggcattttctgtgcacgatctttactctccctggcaaccctatgaggtagatagtccatgactcccattcatggatgaagaaacaggcccacacaggtaaagcaacttgtaccaggtcataccgctagaaagatgtagagtcagccacgcgcggtggctcatgcctataatcccagcactttcggaggctg[134 bp omitted]gaggcagaagaattgcttgaacccgggagacagaggttgcagtgagctgagatcacgtcactgcactccagcctgggtgactgagcaagactccatctcaaaaagaaaaaaaaacaggccaggagcagtggcttacacctgtaatcccagcactttgggaggccaaggcgtgtggattgcctgaggtcaggagttcaagaccagcctggccaacgtggtgaaaccctgtctatactaaaaatgcaaaaattagctgggtgtggtggcaggcgcctgtagtcccagctactcgggaggctcaggtaggagaattgcttgaacccaggagatggaggttgcagtgagccgagatcgcgccactgcactccaacatgggcaatagagcaagactccatctcaaaaaacaaagaagggagggagggaaggaaagaaaggaaaagaagcaacaggtagagtcaggctctgaaccccacaccaatcataacacaacacacagtaggtttgtttttgttttttattttgggcttttgtttgttgtggagacagcgtcacccaggctgtaatgcaatggtacaatcatagctcactgtagccctgaactcctagactcaaacaatcctcccacctcggcctcctgagtagctgggactacaggggcatgccaccacgcctagctaaattttttttttttatttttagtagagatgaggtctccctatgttgcccagattagtgtcttaactcctgggctcaggtgatcctgccaccagggattacaggcacgagccaccatgctggcccttgttttttgttgttttttttttttttttttgagacggagtctcgctttgtcgcccaggctggagtgcagtggcgggatctcggctcactgcaagctccgcctcccgggttcacgccattctcctgcctc[302 bp omitted]gcctcctgagtagctgagattacaggtgcccaccacgatgcccagctaactttttttttttttttggtatttttagtagagacgggggtttcaccatgttggtcaggctggtctcgaactcctgacctcgtgatccgcccgccttggcctcccaaagtgatgggattacaggcgtgagccaccgtgcccagctttttttttttttttttaagagacggggtcttactatgttgcccaggctggactctcaaactcctgggctcaaggaatccttctaccacagctttctgagtagctggggctacaagcccctgccacagtacctggctgtttttgtttttttataattgtggtaaaatataaacaacatggccgggtgtggtggctcacgcctgtaatctcaacactctgggaggttgaggtgggaggattacttgaacccaggagttcaagaccagtctgggcaacttggcaaaactgtgtttctacaaaaaataaaaatattagctgggcagccaggcgcagtggctcatgcctgcaatcccagcactttgggaggctgaggtggatggatcacctgagaggtcaggagtttgagaccaccctggcca[224 bp omitted]gaggccggagaatcgcttgaacccgggaggcggaggttgcagtgagtcaagatcgcaccattgcactccagcctgggcaacaagagcgaaactatgtctcaaatacatacatacatacaaaaaattagccgggtgtggttgccgcacacctgtaatcccagctacgcgggaggctgaagcaggagaatcgctggaacccgggaggcagaggttgcagtgagccaagatcacaccattgcactctatcctgggtgacggagtgagactctgcctcaaaaaaaaaaaaaaaaaaaaaaaaacttaaccattgcagccatttttaggtgtacagttcagtggcattaagtacattcacactgttgtgcaaccatccccactatttgcaggatgtcttcgtcatcccaaacagaaactctgggtgttttcaatctgctgatgattgctacagaggaattccaggggacatctgttgcgcacctactgtgctcacgctggggcctctgggatggacaggattctgccaaggcagacatctgggtcaagacagtcctgcacagttgttcaggttgtggccaaggttgcgtttgcagatttgccatgtaaaaatacaggatgctcagttacatttgaatttcagattaatagcaaaaaaaactttttggtataattctgaaatatttcatgggacatatttatactaaaacgtcatgcactgttgatttgaaattcaaatgtaattgggcctcctctatttcgtc[212 bp omitted]gaggcaggagaatggcgtgaacctgggaggcggagcttgcagtgagccgagatcgcgccacagcactccagcctgggcgacagagccagactctgtctcaaaaaaaaaaaaaagaatccagtccatagtcccctgagccatgtgccctggggtgcagctgggtccttcaggagaaaaatgctctatttctggcactgggaccgagcctgatgtgggttttttgttggtttttg[212 bp omitted]gtgcacctgcagctctcctgcataggcctcagccgtcctgcatgaggacactgggaggcaggtgctccctatcaaccccgtgttacagttgaacaaactgagccccagaaaagaaaacgtatttgcccaggtcacacggtgaagaagtgagggattcgaagcccaggtccatctgaagccagagtcacccagaggagaaagagttggaattgagaactcaaggaatgcttggaagtgatcgggctcgagcccacctaggaagaaacagaggctggagacatgagactgtgttgctatttcctctcatcaacccttgggccctattgaggccctaccacaagcctggccctgcagcccagtgactaggagaaattagacacaagataataataacagcaatgatcttttttttttttctgagacggagtcttgctctttcgcccaggctggactgcagtggcgcgatctcggctcaatgcaagctccacctcccaggttcacgccattctcctgcctcagcctcccgagtagctaggactacaggcgcctgccaccacgcctggctaatttttcatatttttagtagagatggggtttcaccgtgttagccaagatggtctcaatctcctgacctcgtgatccgcctgcctcggcctcccaaagtgttggggttacaggcatgagccaccgcgcctggccaacagcaatgatctttgagcacctatattgccagtctccacggtaagagctttcttcattttttgttttgttttgtttcaagacagagtcttgctctgtcacccaggctggagtgcagtggtgtgatcgcggctcactgcagccttcacttcccgggttcaagccattctcctgcctcagcctcccaagtagctgggattacaggcacgcatcactacttctggctaatttttgtatttttagtagggacagggtttttca[141 bp omitted]cctcccactttatggaggaggaaactgaggccagcaaatgaggctgtcatgggaggtggagacaggatttgaacctgcctcagtgcaggaggctcaagagcctctgtcttctctcagggcactgtgtgggagggtgagaaggagggaggcccacagaggcatgacctctgattgccactgtcacctgggccctgctctctgaagtctctgccaagcggggaggtggccgggggagggccctgctctgtgcagcctcccctcccccggcccgcagagttgagcacagagggacagaggcacggaacccccagaaatgtccctcctcagaaacaggctccaggccctgcctgccctgtgcctctgcgtgctggtcctggcctgcattgggggtgagaagaagtgggtggagggatgtggggcccacacctggtgggtgtgagtgtggctgtgtgtcctgtggctctgtagccacgtgagacatgagtacggagtgtgtgcgtttcatggcgtgcgtatgcatgtgcgtgtcggggagtgtgtgtgtcggtggctgagagtgaagtgtgaatgtcacattggtacaaactgggatcatctgtgtgtgtgcacgtgcgtgcgtggaagtgggagtatgcagtcgtggtaaaaaagtgcatgtctgtgtgcatatgtgtatttgtgtgcacctgtctctctgtggggtatgtgtgtgcaaaatatttgagtgtgtggacatgtgtgagggggtgagtgtgtgctggtgtgtacgtctgtgttttgcatatgcatttttttttttttttttgagacggagtctcactctgtcacccaggctggagtgcagtggtagcagtggtgcgatcttggctcactgcatcatccgcctacccgtttcaagggattctcctgcctcagtcttcagagtatttgggactacagacacacgccaccatgcctggctaattttttttttttgagacggagtctcgctctgttacccaggctggagtgcagtggcgtgatcttggctcactgcaacgtccgcctcccgggttcacgccattctcctgcctcagcctcccgagtagctgggactacaggagcccaccaccacgcctggctaattttttgtatttttactagagacggggtttcgccgtgttagccaggatggtctccatatcctgacctcgtgatccgcctgcctcggccttccaaagtgctaggattataggcgtgagccactgcgcctggccaatgcctggctaatttttttatatttttggtagagacagggttttgccatgttgcccaggctggtcttgaaatcctgacctcaggtgatccgcccgccttggcctcccaaagtgctgggattacaggcatgagccaccacgcccggccatgtactttatgttaaaatgggatcatattctagatcagcattatccagtagaaatttaaatttttaatacagggccaggcacggtggctcatgcctgtaatcccagcactttcggaggccgaggcgggtggatcgcaaggtcaggagatttgagatcatcctggctaacagatgggtaaaaacccatctctactaaaaatacaaaaaattagccatgcatggtggcatgcgcctgtagtcccagctactcgggaggctgaggccggagaatcacttgaacccgggaggcagaggttgcagtgagccgagatcgcgccactgcattccaacctgggtgacagagcgagactccgtctgaaaaaaaaaaaaaatttaacacgtatgtagacaatgtgcaaggcaccattccatgtgcatcgtatgtagtaactcttaattctcacgataaccctgaggtagatattattaccccgttctacaaaaggagaaacagtcctggggagacaggataagtcaccggccaaggcacacagctagctacatgtggcccccgcgtgacggctggtctctgtaggcgaggctttgtccagatgcgtgggtagaaggtctggcccggaaagaggaactgacagcaaggctaagccaatgtctgcccctgggggcagaaagtcacctcctgctctccctccactgtccacagaggtagctcagacagggtgggggtcacaggagaacgaagggagaagggggtagttcctgggcagcaaaatcaggtggtgaagggaggcatcagaggatggcaattagagaggccattagaggggaaccacaggcagacagggtgacaggagggactactgacacaaggtgaagagatggcccagccggacggggtggctcacatctgtaatcccagcattttgggagcccgaggtgggtggatcacttgaggtcaggagttcgaggccccaacatggcaaaaccccatctcttctaaaaatacaaaaattagccgggcatgatggcagatgcctgtaatccctgctactcgggaggctgaggcaggaaaattgcctgaatccaggaggtggaggttgcaatgagacgagatcatgacactgcactccaccctgggcaacagagcaagagactgactctgtctcataaaaaaaaagaaaaaagaaaaaaaaaaagagatggctgatggttaaagaggggttagcggtcaggggacacataagggtaaaggcaggaggcaagaggactggcagggggctgcccctgggccaccgggagcgacacaggatgagcatggagggaaagggagaaggggattctagggtcccagcctacccaagttgccctctggttccacctagcatgccagccagaggcccaggaaggaaccctgagccccccaccaaagctaaagatgagtcgctggagcctggtgaggggcaggatgaaggagctgctggagacagtggtgaacaggaccagagacgggtggcaatggttctggtgagggtgtgctgggctgggtggtgggaggggactcctgggtctgagggaggaggggctggggcctggacccctgagtctcagggaggaggaaagggtgggagtggggctgtgacccctaggtctgggaggagtggagggttagagctgagagcaggaactcctaggtcacagagaggagcggataaatggggcagagaacacctggggagagctggggcctccactgtgatgtcctctctcctgtaggagcccgagcaccttccggggcttcatgcagacctactatgacgaccacctgagggacctgggtccgctcaccaaggcctggttcctcgaatccaaagacagcctcttgaagaagacccacagcctgtgccccaggcttgtctgtggggacaaggaccagggttaaaatgttcataaaagccaggtgtggttgtggcgggtgcctgtagtcccagctactcaggaggctgaggtaggatgatggcttgagcccaggagttcgagaccagcctgggcaacacagcgagatctcttgggggtaaaacaaaaagaaaaaaaaaagttcatacttctccaataaataaagtctcacctgtgtccctgtctggatccttccccagtgtggccagaaaaaaacccaccccactgcctcccaggaatcaatgagtagaagaggtgacacctgatggggaaggaagagtagggaggtcgggaagggtatcaaggaataacaccctattgtgggcttgcggagaatgggggacttcaaggcgtgtcagtttcaggagggtgagggcaggagcgtgggtggagtcagcaggtccccatgatggccctcactgagagcttcgcccttgtctcctacaagctctgactccattcccagtgggcacccagcacctccaacccctccacagcccccaacccagcctctgtcggaggcgaattctcagagtgagggttccctgtcacttgagagaaggttccctgtgacgtgaccttgggggacgtcattgccctttctgtccccacccaccccctccgcagttctgttggccaggactttggcctagacaaaggatgggggttgtggctgtggagcggaagtgggtctcaaccactataaatcctctctgtgcccgtccggagctggtgaggacagcctgccagagtctggtaagaaagggactcagggtgcggggacaggggggcgtcagcagggagagggcaaagatcgataaagcaggaattttaagaggcacaatattagaagcccgtgttggaaccatgactgtgtgtgtgtgtgtgtgtgtgtgtgtgtgtgtgtgtgtgtgtgagagagagagagagggagatggagtctcgctatgtagcccaggctagactcaaactcctgggctcaagcaatcctcctgcctcagcctccccagtagctgggactacaggtgcaccaccacactccacaaatcacagaatttagaactgtagactatttgagcttctgcttagagttagggtggctgaggtggggaggatcccttgagcccaggagtttgaggatgcagtgagctgtgatcttgccaccgtgttccagcctgggtgacagagaaaccccatttctaaaaaagagaaagaaaaagggataggtacaatggctcatgcctgtaatcccagcactctgggaggccgaggcgggtggatcacttgaggtcaggagttcgacaccagccttaccagcatggtgaaaccgcatctatactaaaaatacaaaaattggccgggtgtggtagcatatgcctgtaatcccagctattccagaggctgagacaggagaattgcttgaacccaggaagcggaggttgcagtgagcccagatcgtgccactgtactctagcctgggtgacagagcaagactcagtcttggcggaaaaaaagaatgaaaaaatttaaaaaactaaaaaagaactgtaggctgggcgtggtggcttacacttgtaatccaaacgctttgggaggcca[134 bp omitted]gaggcaggagaatcgctcgaacccggaagacagaggttgcggtgagccaaaattgcgccatcgcactccagcctgggcgagagaacaagaccttgtcttggaaaaaaaaaaagaattgtagaccatttgcttgtgttctttctccggggatcagatctcaccctctttctgccgtacttcctcatctcctacgtgtggatgatgatattgtgccctgtgcatgttcttcgtcaccaaaagtgcctctctcatagagcaggtgagaactcagtgaggagatgcagggacatgaggtctgacttagggcagagccctaaggtaacacatttgatctactgtaggtccttaatggtgtctgcagagcacctccctgcactgactcagccttagcaaagggcagaggctttgctgtgttccctgctgggcccagaactgtttaggtgctcaagaaagccttctaggctgggctcagtggctcacacctgtactcccagcaccctggggaggccgagatgggaggatcgcttgagcccaggagttccagaccagcctgggcaacaaaacaagtctcccatctctacaaaagaataaaaattagcagctgggcatggtggctcatgcctgtaattccagcactttgggaggccaaggcaggcaaatcacttgaggttaggagttcaagaccagcctggccaacatggtgaaaccccatctctactaaaaatacaaaaatcaggtggggcacagtggctcaagcctgtaatcctagcactttgggaggccaaggtgggcggatcacgaggtcagaagttcgagaccagcctggccagcatggtgaaaccccatctctactaaaaatacaaaatattagccgggcatggtggcaggtgcttgtgattccagctccttgggaggctgaggcagaagaattgctagaaccctggaggcagaggttgcagtgagccgagaacacgccactgcactccagcctgggtgacagagcgagactccatctcaaaaaatacgaaaacaaaaatcagccgggtggtggcgggtgcctgtaatcccagctactggggaggctgaggcaggagaattgcttgaacctgggaggtgggggttgcagtgagccaagattgcaccactgcactccagcctgggcaacagagtgagattccatctcaaaaaagaaaaaaataataattaaaatgttaaaatcaggagtagaatcacagaatgttggaaagtgaggcccaagaagggggctgtgtccaagtccatgcatgggaaacttgactgggacaccgagctcacacagagcaggatctcagtcccccccaccagagtggggcgtgaccacaggaacagccgcctccagtcagcctgccacatgacaccccctcaatgttccaggtctctggacactatgggcacacgactcctcccagctctgtttcttgtcctcctggtattgggatttggtgagtgtgggcttccggggagggaagccttggggaggggaatgagctccaagcatcttcccagcccaggcccttcttacctctgcctctgccctctcctcttcttccttcctcctttccccctgctgcagccccacgggctctcctgacacactctccccctgcagaggtccaggggacccaacagccccagcaagatgagatgcctagcccgaccttcctcacccaggtgaaggaatctctctccagttactgggagtcagcaaagacagccgcccagaacctgtacgagaagacatacctgcccgctgtagatgagaaactcaggtagcacctgcccctggagaaatggggtctggcccataccaccgactgcatccaggacccagaagttcaggccccagcccctcctccctcagacccaggagtccaggcctcagcccctcctccctcagacccaggagtccaggcccccagcccgtcctccctcagacccaggagtccaggcccccagcccctcctccctcagacccaggagtccaggtccccagaccctcctccctcagacccaggagtccaggcccccagcccctcctccctctaaccatctgtgctttctccccagggacttgtacagcaaaagcacagcagccatgagcacttacacaggcatttttactgaccaagttctttctgtgctgaagggagaggagtaacagccagaccccccatcagtggacaaggggagagtcccctactcccctgatcccccaggttcagactgagctcccccttcccagtagctcttgcatcctcctcccaactctagcctgaattcttttcaataaaaaatacaattcaagttgcttctcatggatggcactgcttttctgaggactcaagggccaagatggaggggctgactcagtccagccaacatttaatgagcacctactttatgtatggagctctaacccatgggtccatgggaataaagcagtgaatagtaacaataaataatcgtaacagcaattagagactaatctttattgaagtccggctttctctcttttatttttttattttttgagacagggtttcactctgtcacccaggctggacagcagtggtgcaatctcggctcactgcaccctccgcctcccaggttccagcgattctgtgtgcctcagcctctggagtagctgggattatgggcatgtgccactgtgcacggctaatgtttgtatttttagtagggttttgccagttggctaggctggtctcaaacttctgacctcaagtgatccacccgcctcagcctcccaaagtactggggtgacaggcatgagccaccgcgccatgccaaaatccagccttctcatttgtaaaataacaaatcatagacacagctagtccacagtggcctctgacagtctccagttgttaacggtgaatggtgtccaggtttttggcgtcctgaacaaagaactggacaaaacgcacaaacaaagcaaggaaggaatgaagggatttattgaaaacgaacatacactaaacagtgtgggagcgggcccaagcatatgggttcaaaagccctgttacagaatttttgggagtttaaattccccctagaggattccccttccactggttacttctggtacaccctatgtaaatggagaggatgaagaaaagttacaaagtcatttatggcctaccggagaggatgtttcctgttatagctgaagtgaattggccttatgttccctgcctccctattttcctgccttacagttgctggactgacacattttttattttatttattttgttttgagataaggtcttgctctgtcgcccaggctgaagtgcagtggtgagatcttggcttactgtagccttgaccttttgggctcaagagatcctcccatctc[131 bp omitted]accttgcccttccaaagtgttgggattacgggtgtgaaccaccgcaccaggcctgggctgacactttaaacgtgccattgcaatcagtgtataatggtcccgtggcagagggagaatggtgcccaag[132 bp omitted]gccaacatggtgaaaccttgtctctaataaaaacacaaaaattagctaggggtggcccgcgcctgtaatcccagttacctggaggctgaggcaggagaattgcttgtaccctggaggcggagatagtgccactgcactccagcctgggcagcagagtgagactccgtctctaaaaaaaaaaaagaaaaacttattaaaaaaaaattgcaagcaaaaagcacagaaggcagaaggtgcaaataagcagaggctccatggtctgaaggaggccagtgctgggaccatgaatgaagggggctgggggccaagattcctgtatcctgagggagtccagggtggtactgctccccaagtcccatgggtggggctattggtctctggggatccactgcttgtatttctcctaatctgcttggcattaacctcctgccaggctttcaacacccttggggcagttttcccaggtcctgaggctgggcagctgagtccagtaaaaaacaggggccctggagagggactgtgggcaatgcccccgagtccccggggcctgggaagaacagaggctgccaagtgcagggggtggtggggaggggaagaccctggagtaacaatccctgctgtgtccacttggttcccacggactcaagccaagccaaagcactgcccggaccagttcggcttccaaccaatcctggtgctggcctcagactcctcctttctttctcagaaccccattcccctcagggcccccagagtccaggcccctagattcttcttcccctagaactcaggagtctgggaccccccagtcccttctcctcaggacctagaaggttggatccccagccccctttctcccttagaacctgaaatcacagcccttgatcagtattttgcgccccctagtggagagaagagtgggtctgtcctgtgacttacatacagcaggaatggcagaattttttacttattatgatttttaatttctttagagacagggtctcactctgtcacccaggctggagtgcagtaatgtgatcacagctaattgcaacctcgaacgaactcctgggctccggcatccctcccacctcagcctcagagtagctggaccacaggtggatgccaccacaccacctaattttgttaatttttagtagagctaggatctcgctatgtcaccaaggctggtcttaaactcctaggctcaagcgatccttctgcctcagcctcccagagtgctaggattacaggcatgagccacgaagcctggacggaatggcagaatttatttggtcactccacagagcataggaaggctctgcagggaacctgcctccacaggagccctgtccaaggtcacacttctcatgagaagcttagacctcatcatgctccaacacattggcccttgcagtgtatgagacttggagagcagattgcagcagtttgtatttatagctgagagcgcagttggggttgcagtgaggctggagaaagtttcaaagcccctcacttgcctgggctttccatggtcctctacctaaatttgtacaagtcattttgtactttttttttttcaagacagagtctcccttttcttgcccaggctggagtgcgatggcatgatctcggctcaccacaacctccgcttcccaggttcaagcgattctcctgccttggcctcccaagtagctgggattacaggcatgtaccaccatgcccagctaattttgtacttttagtagagatggggtttctccattttggtcaggctggtctcgaactcccgacctcaggtgatccaccagcctctgcctcccaaagtgctgggattacagtgtgagccaccacacccagccaattttgtactttttaaaagaggccaggccaggcgcggtggctcatgcctgtactcccagcactttgggagaca[134 bp omitted]gagacaggagaatggtgtgaacccaggaggcggagcttgcattgagctgagatcatgccactgcactccagcctgggtgacagagcaagactccatctcaaaaaaaaaaaaaaaaagaggcccacaaaacacataagcttcagaccccacaaagtctctcctcaatccctgtcttagtctattcacttcatccctggacttaaaagactgggcctacacattcaaagaatcgttattaacaccattattgtctgtaacagtgaggatgaggcactgagttttctttttcttttctttcttcttttttggaggtggagtcttgctctgttgcccaggccggaattcagtggcatgatcttggctcactgcaacctctgcctcccgggttcaagcaattctcctgcctc[225 bp omitted]ccctcagagaggtaagtcactcaccttctgcacctagagagcctcatccccagggcaatcatccccagggcagtgctggagatacagcagtgaccacaacagtcccaggtcagcctgcccagttggggagacacacccatccctgacagtgatgacacaaagtgagcagggatggggtggaggagctgagggggcaagggaggataggaaaagggctcagagagagtttcctagagcgagagctactgttacagggctgagacctagaggaaagtggaggaaaccgataataaaatgataattatatattcagaatatcccaatgcaaagcttactctttttccaggtaatatataaggttcataatcacagcgctccaaatattgaccacttaagcatgaggcccagggcctgatgttttccattcgccatctaactacgtcttcccaataacacagcggggcaaaacgggaagacgaagaacgagtacgattatatccctggtttataaaaggggagaaactgaggctcaaacatagatgtcacttgtcaccagcctggccaacacggtgaaactccgtctctacttacaaaaaaaaaaaaaaaatgggaggctgacgcaggagaattgcttgaatccgggaggcagaggttgcagtgagccgagatcgcgccactgcactccagcctgggtgacagagcgagactccgtctcaaaaaaaaaaaaaaaattagccaggagtggtggcgtgctcctgtaatcccagctactcgggaggccgaggatgcagtgagccgaggttgcagtgagccgagatcgcgccattgcactccagcctgggggagagtgaggctccgtctaaaaaagaaaaaaaaagagagagagagacgtcacttgtccaggatatcttatccagtcagtagcaccacaagggttagaaccctggccagacatccacccaatttcacgggtgaacagttaacagcctctgagagtcttgtcctctctgggcctccgtaacaccctctccaaactaagggtctctcagcagatggccgggtttagagctgtacgaagacacacagctaatgaaaaattgtggaattctcagagcccgtgaagcctagcccacggatgcgaggtttggaccactgagggaacgcgcatgcgtgctaggcagggcagtccgaaggcttgggggtgtatcatagggtctcatcggaggtttgttggccgtaagacccctggaattggaactctaaaaacacagaaaggatatgagctcaggagacttgaacgaaagagttgtcttaggaagaggggtcagaagacaagggtgctgggcaaaaggctagttcttcgaatcagaatacggtggccagaaaggttcctctgacgaaagaggggcgtggttcgaagccgtacagtggccggtaaagctcaagaaacatggaacgaaaaggacgcgaagaatcggcagggagaagcggacaggatgtcccgaaaggctcatataaccgaaaaggcgggttaatgtgaagggacggaagggacagaacttgcgggaggcacatgctggccgagaaagtcctggagttcggagcatacagtgtttttattaggtggaaacaaacgggctgggagaaagacgagtacggtggccaggttggtccttccatagccggaagtggccttcctgagaggcgtggctgcggcactcttgccggatagggtggcccggcggggctaggaaagcgtgaaatctcgcgcgattgcgctgcgaagtcggggacggggcggggctggcggcgggggcggggacccggagcgggaagatggcggcggcgcaggaggcggacggggcccgcagcgccgtggtggcggccgggggaggcagctccggtcaggtacggaggccgagaggggactgagggggttcttccccagccggggggcctcccacggggcgtgtcctacctcttgtcacggaatcccgtgcactgggggctccttggccagagggaccttgaatacccggcccaggcagggccggaccgcccgggaggccggacggtgccgggaacagggccctgttgcgggtcggttcccctgcacgctcgagccgggcggccaccaggctcattgctcgatccggggagacagtggctcggaggggcgcaggcttgtaccttggcgcgctgggttctcaactccgcgattccatgctctgaggccgttcctagagtggtctggcgttcaggtctcgttgtagtgtttgaggtgtgcgcagtgattaattgggagttttctagctgtggggaagtcagtattagcagggcacggccgacagacccattttacagacgggaattcaaggaacagtgagactaaggcgcttctagaaggtcatcctggttaggtttgtaactttatgtagaagttacaagacactgctgacacagggactggtatggttgtggttttaatgtaaaatagttctatgggttaattagtcctggtgcggatgacttctgccccactgctgtcttaacacactgcagagcataccatttcaggcagctaccgttcaggcatttggggaatagatggagagacatgaaggtgctgtcgacccacccactgggatgtcactgacatgtgggaggcagctcaggggaaaggagtgcgggttgagaggggagaatgaagctgactctctgtgtgaccttgggcaagttcctttccctctttaggcctttatctctcccgtgttaaatgcagaggttggacaggagggccagccatatccctgctgtcaggggacgaagagaggagactgacatgtaaacagttgtaatcctgaatgattaggttggtgacaaaagtctgtgtcagggactgggggagcccagagaaagagcaagtggtatcacttgggtaggacacatggatgaaatttgtgtgatagagcccactgtatctgctctgaatcttttcagcattctcagccagggcctggcttcagggacagcttaggaaatgtttgttgagttagtgctggaatgaaggctcagttcctgtcttcaagggtttcccagtcttgctgaaaggaggtcgtttcccctctgggtttctgttgattattgggttgatggtggcttgagagaccagggcccaggttgttctcattgccctgagcttccagatggcactctgatcttctcttgtaccaactctgcttaaaaacaatcaagagttacccctttgcctttaggacaaagtacaaattctttaataaatcacagtcttgcacgatccgacacttttcttcagactagactaggatttctcgagctcggcactatcaacattttgaattggataatgctttgtttggggggctgccctgtgcattttaggatgtttagcagcatccgtggcctctacgcactagatgtcagtaggatccacgcccctccccagttgtgacaaccatatatgtctccagacattgccaaatgttccaagagcaggggggcaaagccatccctgcgtgagaacaactgcgctaaaggggatccgctgctctgaacctattttatttctaaacctcttttattgcctctcagtctctttcctcatagtctatgcacaggtctctcccctctttagctagttgatgtgtattagtcctacagatttcagatgtcccttcctgcagaaagccctctttgactgtctgggctccgctgtcccagccctgccctactgggtttcactgtctggggactgggaaccccaggagggcagagccaggactgccttgatcaccactgcttccttagcaccactcagctcagcgccaggcacagaggaggtgctcagtgtttgtggaatgagcggatcttgaaacagaggctgggctgaggtggaattccctgatgccgtggtggatccaggtaatcagtgaagacatgccgcaaaacctagcttcctcctgctcttgcctagccctggtggtctcagctacttcttggaccctttagcagatgttgctggggattgtgtgtgtgcgtggacgtgcagatccgagagcaggaactgtgtcttagtcactgatgtgtccacagccactgccacccttctcccatgcccagggcctagtgcacagcaggcacaccctctgcacagtctgctgctttagctagcctgctcctgtagccaggaactcggacacagaacccacagctttgccattccttccttcagcgaatgcgaattgagtctactccatgctaggcctttgctgatgctggagatacagctgtgaataaaataggtgctgccctcttgaaggcccttacacttatgttctagttggagctgaatttataggggaagcacagacagggacacacagtgaacaagataaataagaaaaacagcagttcagatggctctgcgtgccatggacagaaataaagctgggatggggataggaagtgaggggtgggtagaagagttgcaattaaatagggtagtctagaaggcctctctgaggaggtgacgcttgaacaaagacctgaaggaagtgagagagggagtcccaaagatacacgagggaaaagcttttcaggcaaaggagcagccagtgcgaaggccctaaagtgggaggtgcctggtgtgatgaaggaagggcgaggaggctggagcgggtgaggggagaggggtggctggggacagatgcagattatgccaagctttggaggccatggggaggacttggcctttactctgagggaaataggagctgaaaagagtgactctttttttttttttcttttttctgagacggagtctcgctttctcaccacaatctcggctcactgcaacctccgtctcctgggttcaggcaattcttctacctcagcctctcaagtagctgggattacaagcacctgccaccacacccagctaatttttgtatttttagtagagacagggtttcaccaggttggccaggctggtcttgaactcctgacctcaggtgatctgcccacctcggcctcccaaagtgctgggatttcaggcgtgagccaccacgtccagccttgtggtataatttagatggtataacgttcacctgttcttaggatagagtccattggctcctggtccatttatgcagttgtgtggtgcagccatcaccacagtctggtctgagaaagcttctgtcccctcaaaaagttcccttttacagtctctgctgctcccaatcctaggcagccacagaggtgctatctctgtaattttctaaaaatgtcttaaacaaggatctaaacaacatccagtcttttgtgtccagcttctttcattgggcataatgggtttgaggttcatgttgttacatagatctgcagttgttcatttttattttattttttacaacctaggatcagggaaatttggcctttggggaaatcctaaagtacgtgctcacagttgttccttttcactgctcagtggtagtctgcagacatgacacagtttattctttcagtccttgaaggatatttggattgtttttagtttttgtctgttgccaataatgctgctatgaacattcatgtacaggcttttctgtggctgtattttgtttctttttttttttttctaagtaagagagacagggtctccctgtgttgctcaggctggtctcgaactcctgggctcaatggatcctcctgccttggcctcccaaagtgctaggattataggcatgagccaccacacctggccactgtttgtttttgagacagagtcatgctctgtcgcctaggctggagtgcagtggtgtgatcctggttcactgtagcctcattctccaaggctcaattgatcctcccgtctcagcctcctgagtagctgggaccacaggcatgcactaccacacctggctaatttttgtatttttatagagatgaggtcttgctgtgttgcccaggctggtcttgaactcctgggctcaagcagtcttcctgccttggcctcctgaagttctgggattataggcgtgagccactgcgcctggtctggcttcatgttttctgcctcctgggtagccattcaggatgggtttgctggattgtgtagtaggtgcacatatgacttgttcaataactgccatattttccgaagtagctgtacttttactttcccccctagcagcatacgagggttcctgtttttccacatccctgccagcacttgtgattgtctttctgctgatagccatcctaataggtgtgaagtgacacctcattgtggttttaacttgcctttccgtgggaaggttcccagccagattgcccatcactaacgggtaagcgaagagacctgggagtcagtcagatgcagcttcaaatcctgacctggcatcaagtgtcctttcctgaccccaaatcagctcagacccattgaaacccatacttggacccctaaatttcccaatagctaggctggccttgaggagggggccttgtgcctgtctgatttcccttccccagccgacccccgccccatagatctcctcatcagaatgtggctttctctgtctcagcctaagggtctcacccagacgacccagacgtcaaagggagctcctcagggaggcctctctgaccacccactccaaagtggatccctgttcccaactcagttgctgtcacttccccctgcttgttttccatgtaccatttttaattatcctgtttaccgttctagtgtgtttccttctagatccccagctctgggtaagcagggcccagatttctgtctaaaatgttccagtattttcacaacctggtccacaggtcagagaggtgaagtgatgtgcccaaggtgtcacagccaagaacggtgggaccaggactatagctgaggtctgtttgaccctggagcccctccaatggtgtcctgtgctttgggagattacaggaaagagctcttgctggtgaaggggacaggaggtgacaagtgacacatttaacacatgtagcccctctaaccatgctcctgggacatttgctatctggtgggtaaggtgaatggagaaaacattgcagaggagtggactaggggctgtggaggagagggccagacactggagcctcagagggaagtgggtttgggtgacctgagcgtccggggtgagtccttcaggcagcggtggccacacaggtgtttatcacagccttgctctgtgccactggtgctcttgagctaactgtgactgtgatagccctggtcctgcctcttgaaggctgatggctgaggggacagctgggaggaggggtgaatgagaacaggactggggagctagcagggtgcgtgaagggtgagcagaacatccccttccaaacctggcattcagagagtctctgattgtgaccttctgtgtctgagtgaagagtcctcctctgggaagccgtgcctggctcccttgcctgccccccttcccttctgtcattctgcttctgcggtccttcctgagtgaccagacaagtggcttcacctctctgagcctccctttgctcagcagccggatggagctggtcatagttttggcctcaggattagtgtgctgtgtgctgtcacagacatgtcttgtggccgtggcttatggtagcagctgatagtctggttgtgtttttctgtgtctgtcccacctgctggaccaggggcccttggagggcagggttggccacagagggggcctcaggaatggtttgcccagggaaggctctttcagctaagccccagccttgaagaatctggcacctgccataagactccttctgttgttgtccccaatagccacctccttgcatcctggctccagccccagggaacagtggacagtcatcagaatcagactgtgcctctaatcttctgtttctgcacctgctgcttctctcacttcctcctttgtgccaccaacttgctatgttttaggtctcagcttcaatgcccccttctccaggaagttgccccgaaccctagactggaccaggtgcctctcagggctcctgcattcctgccccgttctggacagtcactgtctagagatgaatctttctcccccaccgggctgttaaaccccaggaggacagcaaaagactctctaggtcaccactgtccctaggtcacagaggtgctctgcgagtgttttcctcctaaaagaagaggaccgcaccttcccaggtgttttcactgattcattctccagttattgataagcacccactctttgcccagcctgtgcctggccttcatgcatgatggtgtctaagacagcccccgtgtccattctccctccttaccctggcctctgtcccccacaggtgaccagcaatggcagcatcgggagggacccgccagcggagacccagcctcagaacccaccggcccagccggcacccaatgcctggcaggtcatcaaaggtgtgctgtttaggtgagcagacgggacttgggtttgttcaccgaaaacattcaaataaaaataaggaagaaaggaaaagtcagctgatcagctgaggatggtgatcattactgtatggtagagttgctttttttctttttttttttgtatgatggaatgttttctaaaccttttttttactctggtaaaacatactgaagtagggagtctccctgaacctgttctggtttttggggggctacctgatttgtgaaaaaataaaaacacaaaaaatactgaagtagtttgctagggcccttgtatcaagtaatatagacggagtagcttaaacaactgaaataggaaattcattgtcttacagttctgaaggctggaagtccaggatccagctgtgggcaggggcagtttcttctgtggcttctctcctgggcttgcagaaggccgtcttctccctgtgtcttcatgtggtctttcctctgtgtgtgtctgtgtcctaagctcctcttatggggacactagtcatactggcttagtacccaccataatgacctcactgaaccttacttttttacagaccctatctgggccaggcacaatgactcaccctcataatcccagcattttgggaggccaggttggaaggactgcttgagcccaggagtttgagaccagcctgggcaacatagtaagaccctg[145 bp omitted]aataaaaaaattccggaggctgagacaggagaatggcgtgaacccgggaggcggagcttgcagagagctgagatcgcgctactgcactccagcctgggcaacagagaaagactccgtctcaaaaaaaataaaaaatacaaaaaaaatacaaaaattagctgggtgtggtggcacgtgcctgtagtcccagctactcaggaggctgagggcaggagaatcgtttgaacccaggaggcagaggttgcggtgagctgagatcgtgccactgcattccagcctggggacagagtgagactccatctcaaaaaaaaaaaaaaaaaaaaagccaggtatggtgacacgtacctgtagtctcagctattcaagaggctgaggtaggaggatcacttgagcct[137 bp omitted]tgcctcagcctcccgagtagctgggactacaggcacccgccaccacacctggctaattttttgtattttcagtagagatggggtttcaccgtgttagccaggatggtctctatctcctgacctcatgatccgcctgccttggcctcccaaagtgctgcgattacaggtgtgagccaccgcacccagcctatttttatttttgtaatggagtctcgctctgtttcccaggctggagtacagtggcgcgatctcagctcactgcaacctccacctcctgggttcaagcgattctcctgcctcagcctcctgagcagctggaattaaggtatgtgccaccatgcccagctaattttgtatttttagtagagatggggtttctccatgttggtcaggctggtctcgaactcccaacctcaggcaatctgcccgccttggcctcccaaagtgttgggattacaggcgtgagccactgcacccagtgcctagctaatttttgcttttttttttttttattagagatggggtttcacta[136 bp omitted]accactgtactccagtctgggcatcagagtgagaccttatcgcaaaaaaaagttggggggaccctgtctctaaatctagtcacggtggtactgaaggttgagactttaacatatgaattttgggagacatgattcagcccacatctgca[132 bp omitted]ctgcagtctctgcctcctgggttcaagcgattctcctgcctcagccacctgagtagctgggactacaggcacctgccaccacgcctggctaatttttgtatttttagtggagatggggttttgccgtgttggccaggctggtctctaactcctgacctcaggtgatccacccgcctcagcctcctaaagtcctgggattataggcgtgagccaccacgcttggcccattttaaccatttttaagtatgtagtcctgtggcattaagtacatctccactgttgtgcccccatcaccattatccatcccgagaatttactcttcccaaactgaaattccatacccatcagacacaagcttcccatttcttcctccttgcaacacctggcagccacttttctatttcctgtctctctttcactactctagttagctcctgtatgtggaatcagacagcatttgtccttctgtgactgcctggtggtgacccttttacctgtgggttcacatgctattcctgggcagtgggaccccagggcctgttttttcaaagcccagcttctgtttgaggccctggggagatgctgggtggtggcgggggaatatgcttggcactgggttctatccttcctgcctagacctagtgacagtcaccttctttgctctgagcctttgtttactcctctgcaaaatagatattccttttattttttttttgctttttggagatgtattttagcaaaataagagaccacaccatgcagttaggcaatcagcttccctacttatgagatagaaggaattgcacagcagagatgtttacaacaatcatcccgccaggtgcggtggctcacgcctgcaatcccagcactttgggagaccgaggcaggcagatcatgaggtcaagagatcgagaccatcctggccaatatggtgaaaccccatctctactaaaaatacaaaaattagctgggtgtggtggcacaagcctgtagtcccagctactcgggaggctgaggcaggagaatcacttgaacctgggaggtagaggttgcagtgagccaagatcgtgccactgcactcaagcctggcgacagagcaagact[187 bp omitted]ggtggcgggcgcctgtagtcccagctactcaggaggctgaggcaagagaatggtgtgaacccaggaggcggagcttacagtgagcccaggtggtgccactgcactccagcctaggcgacagcgagactccgtctcaaaaaataaaacaaaaataaaaaaataaaacaatcattcctttggctagaatgtcttcacatggccatggccagctgcacgggaggctgggaaatgtggtctttaatctgggaaactgagcaccctgctggaaagcagggctcctattactgaggaagaagaggagagtggttatggggggcagctacttatctcttccataaaatcttattactggtttcccttagcttataaattatgagtgtttattttacaaaattaagtagttcaaacaat[144 bp omitted]aaactgcatctctactaaaaatataaaaaattagccgggcatggtggcaggcgcctatagtcccagctactcgggaggctgaggcaggaggatggcgtgaacctaggaggcggagcttgcagtgtgccaagatgccgccactgcactccagcctgggtgacagagcgagacacagtctcaaaaataaaaaagtgtaatgtgttggtggccatcccataggcacacatttttgtaattggccctaaatgggattatatatagatgctcacagatagagttgtttaaaatagagaaaagttaggaggcggggggcaggtagtgtcagatagcgtgtaagagcacagccctgctgacatctcagccctgccacctctgagctctgtggcctggtcaggttatcacccttcttgagcctcattttccacctcacagacagggaatcttgacaattagctcagggtgcatcagaaggattccaagagaattcatgtcaactgaggggtgcaggagctggcacgcacacagacaatgttggccatgattccttttgttgttcaacgtggaaaaaaaaaaagcctgagcaacacagtaagacc[132 bp omitted]gcctcccgagtagctgggactacaggcgcccgccacagcgcccggctaattttttgtatttttagtagagacagggtttcatcgtg[137 bp omitted]atggcgcacacctgtagtgccagctattagggaggccgaagagggaggatcgcttgagcccaggaggtcaaggctgcaatgggccgtgatgatactactgcactccagcctaggcaacagagtgagactgtatctcaaacaaacaaaaaccttag[134 bp omitted]aacatggagaaacccatctctgcaaaaaatacaaaattagccgggcatggcggcttatgcctgtaatcccagctattcaggaggctgaggcaggagaatcgcttgaacccgggaggcggaggttgcagtgagccgagatcatgccattttactccagcctgggcaacaagagtgaaactctgtcccaaaaaaaaaaaaaaacaactcatgatccctgatgtagtcactgatcacattctagactagagcagaactgcctgcctggtgtcctccaagagtgtcacacaggacactgagaaactgcaggaaagaaacctccccactctgttaagttgcaaaactgacatgtgtgcctcaaaaattcctgccatgtgccctacgcttctcagtcatgcgcccctgtcccttaccgtctccacttcacctcccctccccatggccacgtaaagacttcagattttcttatatatcaccttcttttttttcatgctgcaagcagctctgcatgaaaattatttttatctttcccttcatttttacataagaggtagcctgttttacacactgttctgctccttgatttttttcattaacaatatatctttgaaatctttccacgtcagtgcatagggagcttccttcagagagacatttttaatacaagtcacactgtaggctaatttcctttcttagaactaggcagcatcaaacatcagttcgggtgggtgctcggagaccatcttggctgcagttcttaaaatgggatccagggtttgttttcaggggcccatgaactccttgtagcttgaagctgattatgtgggaatagcctttctagatagcgggtggcgtctgtgtttttgagcacatgtggttacctggagtgggaggtggagcaggaactgggtatataaaggaatggggtgggagggagagttttgattatacgtcttttcatatatttaaaaatgttctgaacctgtgactgtagaatacctatttgggtgggagaaaggatttaatgtctgttttctttgcttactcaagtacatcaggaagcattagaaaggtccagtctcctgcaggcctgggtgcatggatgaggggccatggccatgagccctctgagagggtccacagaactgtgggcgtgtggatacacacaggacgttcttcaggggactggggatctggaatccaaaaaggcctggccttgttttatacatggggatctagaagcccagaggggttaggacccccacagccacacactaagccaggggcagagctgcctgggggcatcactgcttctacactctcccctggtgtgtttactaaaatgagagcctctgctggaggcatcggtatccccagagattgccaggtccagaccttccccagacgtgcatatcagggacttcatggggaggtagcgatggctcagctggaccgtggcccctaagaccctggaccccagggccttgtggcttctacaggcagaggcaagttcctgtgcctgatcctgcccctgatcagggctcagcagggaggcaccccacccacactagaatttactcatagtgtttttctgctccaaagttttttgtatgcctttttcctatgattaaaataacagtaatagctaacacttctcagtcacttactgggtatgcaccaggctccattctgaggtacgtgtgcgtgtgtcagatgtatatacacgctatataaacatatatataatttaatgtgtttaatgcttataaactaccctatgagagtaggcactgttattatccccatttcaaccattgaagttgaccactgaggtcacagtaagtagcagagctgggcttcagatgaagatactgtagtttagaggctgggctcataacctcttctgctgtatggttatcatacctataattaataagtacttgaatcatttaatcacatggctgcatgcagctgagaaacctccattaacacagtacaggttcatttctctctgatataccagtctggatggaggcagactaggattctgcagtcttcagtgacccagactccttgctgtttgttgtgccattgctaggtttttccctttatcctcatagcccaagacagctgctgaagattcagccatcacatccacactccaggcaacaggagagaagaataaatcaagaaggaatatttcttctctttaaggacacttttttttttttttttttgagatggagtcttactctgtcacccagactggagtccagtggcatgatctcggctcactgcgacctccacctcccaggttcaagcgattcttttgcctccgcctaccaagtagctgggattacaggcgcccgccaccacgcccggctaatttttgtatttttagtagagatggggtttcaccatgttggccaggttggtctcgaactcctgacctcaagtgttggcttcccaaagtgctgggattataggtgtaagccaccacgcccagcctcgttttggttttggtatctgttgttgctgctgattctcgctcataatgtcgtttccttttgtgcctggcttatctctgtctgtgtcctagtcattatacttgaaaagttatttgtaggaatttcagggctaggatgagcatattttcctacagagaggattgcctttgcttctgcctgggggcattaccaagtcctaggtttccttgcaccaggttcagggcttgagctgcccttcgtgactccttatcccacgagtggccttgcatacttcgccctgcatacctgttgtgcaactcctgggaatgggtaggccacctggttccttccttctcaggggtggaggcttgcaccttgtggggtcttagtttcctatagggtaggtctctggttacctcatatgttgtatgtgccctgggctagcatttttttttttttttttgagacagggtctcactctgttgcccaggctggagtgcagtggcatgatcgtggttcactgcagcctcgacctcctgggctcaggtgattctcccacctcagcctcctgagtagctgggaatataggcatggtgcgtgctgccatgcctggctaatttttgtattttttgtagaaactgtgtgttgcccaggctggtctcaaactcctgggctcaagcaatccacctacctcagcctcccagcgtgctggggttacaggtgtgagccaccgcgcccagcctaggccagcatttttgtcacccaccaaaacacctagcagatgtcctcggacacatgaagaagcttatagggctcctttacttattctttttttttttttcccctagacctgcaaatccaagatcctttacttctttttttttttttccttgagatggactttttgctcttgttgcccaggctggagtgccatggcacgatctcggttcactgcaacctccttctcctgggttcaagcgattctcctgccccagcttcccgaatagctgggattacaggcatgcaccaccactcctggctaatttttgtatttttagtagagatggggtttca[132 bp omitted]cccttcagtttttgcctgaaggtttggtaacctacagtcgtgtccattcttcagagctgtctatttatatatattcatatgtaaacttgataaaaattacatgcatgagaacaaatacgagaatacgtgagcagcatatattctcattctatcaatatgtataattacaaatataaaatatattgatattttcttagtgtattaattttatcaagcttttccaattttttccagtgagagggttggtctgaataattaagcccactgttactaaaattggaactaacgtatcacttactatctgcttctccaaaaattctccaaaagttcagaaatgttgctctttctaagcttctgtgccttcggttcttttccttttcttttttaaaaaatttaattaattaattgattaatttttttgggacaagctctctatctcccaggctggagtgcagtggcgcaatcacgtctcactgcagccttgaccgtcagggctcaagtgactctctcacctcagtcccccaagtagctgggactacaggcatgggccaccatgcccagctaatttttatattttttgtagagacgggatttcatcatgttgcccaggctggtctcaaacttttgagctcaagcaatccgcctgcctcagcttcccaaagtgctgggattacaagcatgagctgctacacctgacccaattatacttttttttttttttttttttttgagatggagtctcactctgttgcaaggctggagggcagtggcgcaatctcggctcactgcaacctacgcctcccgggttcaagtgattctcctgcctcagcctcccaagtagatgggactagaggcacgcaccaccaggcccagttaatttttgtatttttagtagagacagggtttcaccatgttggccacgatgatctcgatttcttgacctcgtgatttgcccacttcagcctcccaaagttacaggcatgagccactgtgcctggcctctatacttcttaagttattttaaaatgtgtaattaaattactattgactagagttgccgtgttttgctaccaaatactagatctcattcattctttttttttttgagatggagtctcgctctgttgcccaggctggagtgcagtggcgcgatcttggctcactgcaacctctgcctcctgggttcacaccattctcctgcctcagcctccggagtagctgggactacaggcgcccgccaccatgcccagctaatttttttgtattttttagtagagacagggtttcaccatgttagccaggatggtctcaatctcctgacctcgtgatccgcccgccttggcctcccaaagtgctgggattacaggcatgagccgccgcgcccgtcctcgttcattctattttttgtagccattaaccatccccggttctgtgcttttgaagcgctaggattccagattctttcttttaaaaattttatgtttattattttttctttatttcttttttcttttaattcatccatctgcacactgaaggggttccagattcttagtctcctctcgggggatcccagggggctggatggcaggtttcccagtctgagtcaagagtcagcccctgcagccctgtggtcaccaggagctcctgcaggatttagagtcaagggtctgcatgcagaccagggcagtgccagctacccccacacactggcaaacggtggcatctgggctccctccccagatgtggtctttagggacatcttatctccttgccagccctgtgactaccttctcagggcctccctgacttggtcactagccccaggtcaggcgccagcatgtgctaagtcagaaggaagtcaggcgggtctatggcggagagccaaggcttggggactcaccaccttgctgcttctctcctcaggatcttcatcatctgggccatcagcagttggttccgccgagggccggcccctcaggaccaggcgggccccggaggagctccacgcgtcgccagccgcaacctgttccccaaagacactttaatggtaactgccgggtggtagggcagacttgggaggtgatggggtgtggaggggtggaatgtggaggagtgatgtcagcagtcgggacagaccaggtccttgctcactggcaggtctaggaaaacaggtccagggttgaggaactctgggcccatccccaacacgtgagacctctgtcacctgggtccatccccagcacataaaacctgtgtcacccaaaagaaaaagcaaattcatttggttaaaataggttaaatcagggtctttggatgttatatttcaaaagtatgttcagcctttcagggttgcagagggagatgtgcaagggagagagtgtgagaggtggggagggcagggagccagcagaggctgacaggaggtgggcccggaaggagaggagacctgcacttccacagtgggcttgggcacaggcagggcagggcttcaggagcctccagagcaaaagcatttagatctgtcagtctaggcttttctgagcaaacatggccattggggcttgagaaaggaggaagttcttgttgggtcacagtgggttttttttttttttttttttgagatggagtctcactctgtcgcccaggctagagtgcagtggcataatcttagctcactgcaacctctgcctcccgggctccagtgatcctcctgcctcagcctcacgactagctgggattacaggcatgtgccaccacgtccagctaattttttgtatttttagtagagatggggttttacctttttggtacgctggtctcgaactcctgacctcaagtggtctacccgccttggcctcccaacgtgctgggatcacaggcatgagccaccgtgcccggtggctcacagtgcttttgtagctctggactgcttcgtccataagcctgcagagctctgaccaggaaggcccagcagccatgagggcaggagatcattcagggagctcctgccccttcctacccctaaattctaattggcaggctggccagtctccaagtgttctttgttcgttgacttcacaggctcagaccaggacaaacatggtggtatgagaaaagagaaaatatgtcctctctgctgctcttcctctctcctctcccctgtcctccataattactgttcccctgagtgtgctgaccgctgccatagctctttagccagcctgcagaggctctgaagagcaggcctgagctctgttcccttcctgtcccaacagaacctgcatgtgtacatctcagagcacgagcactttacagacttcaacgccacgtcggcactcttctgggaacagcacgatcttgtgtatggcgactggactagcggcgagaactcagacggctgctacgagcactttgctgagctcgatatcccacaggtgggggcagctctcggtttctggccccatggctgcttgactggcactgaaggaccttttcctccagtccgctccttgctgagagcatgtggagtttgggctccaggcttggcccttccctgggctcacatggtctgtgaccacaagccagtccctgagatctctgggcttcactttcccctacctgaaaaaggtagataggggtggaattggcctgggaccctcccagctacctctaaggttgtgcagtcctccactttaaactggtgaaagattagtaattgtccttggggatgtttgcctatcaccagtttatcaggcagccccgtttcaaaataatattagttaatgttgattgagctaagtgcagggtactaagctaggctgactcatggaaatttcccggcaaccctgtgaagcaggaactgttattattctcatttaacatgtgaggaaactgagagagaaggaaagtgatttacccaaggccacatcgcatgagagattcagactcaggctctacggctgtggactctcgcagccctaggctcaaatccaacctcctccaggaagccctccctgactcacagagcactcaggcttggttaagcaccctctctgggttctcacacctgctgggcttccccatcccagcccattctggggcctcattgggactcctgtatgggactgtgagccttgtgataataaggctggggctgcctagatcacttccatgtccccagcactgcccaacgtggggctgggtgcagaatcagcaagtattgaacaagtaaaagggacatctctctttggggccttcttcggctgagtccaagacagctgccctcattcctttctccccagcaggccttctcagctttggggtggagggcacatttctgttctatttctgtctgggtagctagaagcagaatgtggacacagtcattctggtttttttttttgttttttgtttttttttgagacagcgtctcgctctgtcacccagtctggagggcagtggcgcaaccttggctcactgcaacttcacctcccaggttcaagcgattctcatgtgccagcctcctgagtagctgggactaaggcacacatgatcacacccagctaatttttttattttttagtagagacaaggtttcactatgttggccaggttggccttgaactcctgacctcaagtgatccacctaccttggtctcccaaagtgctgggattacaggcgtgagacaccgcgtccagccatcattcttttctttttgagatggggtcttgctctgttgcctaggctgaagtgcagtggtgcaattacagctcactgcagcctcaacctcctgggctcaagcaatcttttcacctcagcctcccaagtagctgggacaacaggcatgcaccaccatgcccagctaattttttgtagagatggggtctcaacatgtttcccaggctggtctcaaactcctctgctcaagcgatcctctcacctcagcctctcaaagtgctggaattacaggcatgaaccaccccacctggctggactttctgacctgcactgagaggtgactcccacagagacctcaagcccagcccccaggccttgccacgagatccaaggaaggaccagggcctggcaggcccagcagggggatctgcttccaagggcttggatctaagtcgaagcttcagggtggggtccaagtggacttaaaaggcaggagagctgggcacagtggcatgtgcctgtaggcacagctactcaggaggctgaggtgggagaatggccagagcccaggagtttaagactgtagtgtgccatgatcgcaactgcaaatagccagtgcactccagcctgggcaacacaggaagaccccatctctaaaaaagatagggagagtgaggagaacacaatgtggccaactgaattcgagctctgcacaaggatcagagaggttcagtgctcgcctttgtctccacccagtgcccctggacaacttgcctcccttcttgaagcctcagtttcctcatctggatcaagtgagaatagtcccccttccctgggaggcaaggagacttgatgagataatgaggaagacttgggcagagaggggccagctggaggtagcagggagtagcacccaggagcccacagactgggtttccatctgcgtacttgccacacactatgtgaccccttggcatgagccccgtttgcctcatctgcaaaatggggtggtaacatgacccattgcataaggttgacatgttatatgtgtgttaactcgttagattaggaagctgttgtctgaagtgcccagggcagggtctggcccatagtaggagctccatgtcggtcagctgcttcttcctgttgagtgagcttaacgagagctcgttgactgagctgtgtgccagtgctccaggtagtccctgcagtggtgccctcgggtcagtgctgtgggaacttcgcatcctctaggtggggccctgaggctcagagagaagctgagctcacacggccatggcaggtagagcgggcgtctgagtctgtctgactccagcatttacctctctgccacccagctacatgccccaccctgagtactcagtaaatggccagagagttgagggggaggaaactgctgcagatgggtgccaggcagggctttaacgtttccctcaccccagttgcccagcctgcccacctgaccttccgtcttttgcagagcgtccagcagaacggctccatctacatccacgtttacttcaccaagagtggcttccacccagacccccggcagaaggccctgtaccgccggcttgccacagtccacatgtcccggagtaagtcgctcccctgcagccaggacccactgtccaggaggccagcatcctgggagcccccaggctaatgtggcggacaaatcccaagtccaggagggcaggcaggaagcctgtgctcaaagagggtgggattggcagggcaggctcaagccccacccagcctgaaagagccctgtggacactaagcagggatacccacggaggaagggagacccacggaggctcagggaccagagagaaattggccagaaaaagcagctggagacagggactcttggagaggaggagacgtccttcaccaagggggaagggccagggttgacttttgcacagtaggggcctgatagaagtagacactcaaaaataatttgtgggctgggtgcagtggttcatgcctgtaatcctagcactttgggagacaaggtgggcagattgcttgagcccaggagtttgagaccagcctgggaaacatgacaaaaccctgtctctaccaaaaaagacacaaaaactagctgggcgtgtgcctgtagtcccagctgctcaggaggctgaggtgggaggatcgcttgagcccaggaggtggaggttgcagtgagccagaatcacaccactgcactccagcctgggtgacagaccgagaacctgtctcaaaaagatagatagaggccgggcacagtggctcacgcctgtaatcccaggactttgggaggcc[133 bp omitted]gaggcaggagaatcgcttgaatccaggaggcggaggttgcattgagctgagatcacgccattgcactccagcctggtgacacagcaagactccgtctccgtctcaaaaaaaaaaaaaatagataaaattcaaagaacagtgtgggcaacataatgagacttcgttgctacaaaaattaatagccaggtatggtggtgagcacctgtggttccagctacatgggaggctgaggtgggaggatcgcttgaacctgggaggtcaaggatgcagtgagctgtgattgcactacagctttccagcctgggcgacagagcaagtccacgtctctgaaaaaacaatagtaataaaaaataagactaccacttctactcccatgataactcattaatccattaaaccactaatccatgaatgggttaatcagttcctgaggggagggtcctcatgacccagtcacctcttaaaagcctcatctctcagtactggcacattggggattaagtttcactgggagtggggagtactagagtacatcagtagtcccagctacttgggaggctgaggtgggagaatcagcatgagttttggccaggacaaacattcaaaccatagcattgtccgtcctcttgttttcgagaagttaataattgttgtcatctttctgcttgcctggctctttttttttttttttttgagacagggtctcactatgtcgcccaggctggagtgcagtggactatctcagctcaccacaatttccacctcccaagttcaagcgattctcccaccttagcctccaaaatagctgggactacaggcacacgccactacgcccggctagtttttgtatttttagtagagacggggttt[132 bp omitted]gagtcctctgtctcctgatgggcagccgtagaaatctcttgctgtacctgtttgagcggagctggagaatggcttcctcagaaagccccccattcttctaacgggagttctgtgtactccacctagctttcactttattgaggactattccagacattccctgtggatttggttaagatccatctggctggttttgggtggcgcagcaacagacagaattctatttgtatgagttaggtcttacctacttcttttagtacaaaaatatcctaaaggatggtaatttttttttatcacctatactggatgaaatgaaaagttgactctatgtgggtccctagaaatgacttggaaaggtcttctggagttacttgagcccctttctgagtgagtgtgtctgaagaatgtgctgcgttggtatgtcccacccggctgacgtccatgtggtgagatctttggagaaccaggcagaagtggcttgagggggtgtgacctacagggttggtctcacagatgtttccctgcagggggatacgtcaggggtctgggctaaaatgcccgatgtttcagaggtcgctctgaaggtgacccaggtgggtggctcttcaccctattcttgtaccccgtttgacgatcacctaatcatcccgttgacccaaatcgatgccagtattttctgcagttttgtctttggtgagtgtgatccatgtcactgtgtggtgaggtttattcacagtcagtctggtctgtaaaatagaacctgcagacagtgaacctgaaaagcatactaggatcatccaggcctccctccccagccttggagctgggaccctcaaagcagggacatagaaggacttggagtgagccacccacaaactccagggtgaaggagagtgtgagttcagaaaagcccccttttggctggttgtggtggctcatgcctggaaacccagcactttgggaagccaaggcaagcagatcacttgaggtcaggacttcgagaccagcctggccaacatggtgaaaccctgtctctactaaaaatacaaaacttagctgggcatggtggcacatgcctgtaatcccagttactcgggaagctgaggtgggagaatcttttggaccccggaggcggagattgcagtgagccgagatcgtgccactgtactctagcctgggcgacagagcaagactccatctcaaaaaaaaaaaaaaaaaaagaaaagaaaagccccttttatccccaagaggccaataatcagtattctagagcagctccgtcccatggagataggatgtgagccagagaaggcattaaaatttttccaatagaaaaatactaaagagtaaaaaggtaaagagaggccaggcacggtggctcatgcctgtagtcccagcactttgggaggccaaagtcagaggatcgcttgagcccaggagtttgaggccagccctggcaacatagggagacctcatctctacaaaaaaaaattttattttattttatttattttatttcattttatttatttattattatttttttttg[135 bp omitted]cacgcccggctaatggtttttttgtatttttagtagagaccaggtttcaccgtgttagccaggatggtcttgatctcctgacctcgtgatccacccgccttggcctcccaaagcactgggattacaggcatgagccagcgcgcctggcctattttattttatttttttttgagacagagtttcactcttgttgcccaggctggagtacagtggcatgatcttggctcgccacagcctccacctcccaggttcaagcaattctgcctcagcctcccaagtagctgggattacagtcatgtgtcaccacgcccagctaattttgtatttatagtagagatagggtttctccatgttggtcaggctggtctcgaactcccgacctcaggggacccacctgccttggcctcccaaagtgttgggattacaggcgtgagccaaaaaatttttttaaattagccagatatggtggtgcgcaacctgtagtgtcctccgactcaggaggctcaggtagaaggatcatttgagtccaggaggtcaaggctgcagtgaactgtgatcaggccactgcacttcagcctgagcaacaaagcgagaccctgtctcaaaaagaaatataaataaaataataaaaaggtaaggccagggccgtgatggctcacacctgtaatcccagcactttgggaggccaaggctagaggattgcttgagcctaggagttcgagaccagcctgggcaacatggcaaaaccccccctaataaaaatacaaaaattagccaggcatggtggcacatgcctgtaatcccagctactcgggagcctgaggtaggaggatcacccaagcccaggaggttgaggctgcagtgatcacaccactgcactctagcctggataacaaaaggagaccctgtctcacaaataaataaataaaaaggtaaagaaaaaccatgagattaatatcaataatagtttaattgagctcaacatattctcgtttcaacatatgatcagtataaaaagtgagatattttacatttttgtttccccttgtgtcagttttcagaatctagtgtgtgtgactgggcacggtggctcacatctgtaatcccagcactttgggaggttgaggcaggtggatcacttgaggccaggagtttgagaccagcctggccaacataatgaaaccccagctatactaaaaatacaaaaattaggcgggcatggtggctaacgcttgtaattccgtctactcgggaggctgaggcaggagaatcacttgaacccagaaggcagaggttgcagtgagctgaaatcgtgccactgcactctagtctgggcgacagagcgagactatgtcaaaaaaaaaaaaaagggtctagcgtgtgttttatatcatagcacttcttggtttggaccagccatatttgcagtgcccagtagctgcatgtggccagcaaccctgatactggatggtgcagctctagaagattttcctccaagaaaggggggctttttcctccccacaggagccaggtccatctggtctggatgcctccaagctgcagaatgtgttctttgcctgagccaaagcctctctcccctgtgcctccccctccaccagccagcgctgccctctggggctctcccttccctggacagtctctgtcaggtgtggacacgattggggcatgtccccctggaattttctccaagtcaacccttgagtgttggtttctccccctggacacaggaggaagatccccaatgatttaataatcatagaaatgatgaggattggccaggtggctcaagcctgtagtcccagcaatttgagaggccgaggcaggtggatcacttgaggttagaatttgagaccagcctggccaacatggttaaactccg[132 bp omitted]gctctctagcctgggcaacagagtgagactccatctcaaaaaaaaaaaaaaaatgaggatgacgtttctgctaataagcagtaggccctgggccaagaagtggtgaggcttttcttccttctttagggaagtgacatcactcaccagcatcccttagcttgtaggattcagagccaagattgcccccagagcccccgctgttggccaggtctctttcccctttccctgtctctccctggccccaggggacaggatagagacttgagggagggcagactgagttttccttcatagcataaggaagagctgaaaagtccccgggctcagtggctcacgcctgtcatcccagcactttgggagactgaggtgggcagatcacgaggccaggagattgagaccagcctgggcaacatggtgacaccctgtctctactaaaaatacaaaattagccgggcgtggtggtacacgcctgtagtcccagctacccaggaggctgaggtgggagaatagctggaacctggga[146 bp omitted]cagctcacacctgtaatcccagcactttgggaggccaaggtgggcagatcacgagatcaggagattgagacaatcctggctaacacagtgaaaccctgtctttactaaaaatacaaaaaattagcagagcctggtggcacacgcctgtaatcccagctacttgagaggctgaggcaggagaattgcttgaacccaggaggcggaggttgcagtgagccgagattgtgccactgcactccagcctgggtgacagagcgagactctgtctccagaaaaaaaacagaaacgtccccaggccagggcagaggttgggagatggagcgtgggcacgcacaagccccttcctccccggcagcatttgggacaacatggcagggggcctgtggccaactgggcctctgcgagaggaagtgaggccaactcctggctggggattcacagcctcaaagtgtttctcatcttggtttctcatgttggtggcttcaggccttttttggaaccgtctgctgcctctttatagtcatgtattcaactggtcatcaccgagcctgtgcaggcgccccatgtgtattcaaacaggccctgcccctacccgcatttccgcacagagtttgcagactggttgcagggacagacagcaggcaggtaaaccactggctaagtggttttggatagtggtgaaatgttgtgaaggaaacaagctggcaggagaatgactgcataggctcattcagtggggtggccagggaagccctgtggaagaaggacattctgccagggacttgaatgccacggaggagccaggccacgaagattgtgtcagggcatgggttcctgggacacggggcagcacgcctgaaggccccgggttggcatgtttgagaagtggaaggtggtgagggttgagaggtcaccggggctacggtgagtgtctggggttccaaagctgcgggatgccatgatcagtcacttgtttttatttatttgtttgtttgttttctttttctttttgaaacggagtttcgctcttgttgcccaggctggagtgcaacagtgcgatctcagcttcctgtaacctccacctccctagttcaagcgattctcctgcctcagccttccgagtagctgggattacaggcacccgccaccacatccggctgatttttgtatttttattagagacggggggtttcaccatgctggccaggctggtctctaactcctgacctcaggggatctgcccgccccagcctcccaaagtgctgggattacagtgccctactgagctggggtttctgcctggggcatttggtgatggtggcgtccccatgatcatgaggaactgggattcgttgagatttggggaggcagttctggcattccaggtcacattgatctcagcaggtgagtgcaaggtggatgccaggagaccgtgagccgttgctggtgggcaggggtccgggctctggaggctgcaggtgccagcaggtctcacgtcccctcctttcccacctcccaaccacagtgatcaacaaatacaagcgcagacgatttcagaaaaccaagaacctgctgacaggagagacagaagcggacccagaaatgatcaaggtaaatgggcagggttgtcagggcctatagggaccaagccaggccattcacagctcatcccagaccactggggctgtcatctgtcaccaccactgaaccaccatgccggctcggtcatgccacctcccctccctgagcactgggctcctcctctgggaaatggggtcaggaggcagctgtctctcagggagtgaggaggatcccagacaaggttacctgagcctcttgccagcctgggaggggtctacatcacagtcccattgtcacatgaggacacttgctcagtctcagccggaagtggcaggccagggactctcacccacacagccaggccccagagcccaagctcagcctggctccaagcacacacacgagaatatggctttagtaggaactgcaggattcatagttgctgtcactcccagtgggctggggagccgggcagttaatctgtggttaacctgcagtgggcactaagagacttcctctctctgcgggtggtcctgtgttgggggggtggtccctgctcatggagctgaggccaccgtgcaagagtgtgtggagcctgctgtcatgaggctgggcttcgcagcctggcctaggatgccagccctgcctctacctctacctcggttttctacatgtggggtgggaggatcctgtcggtggccggaagggtcctgggtggcggaatctctaagcctagggaggagagccttctgccagcagttgctgtggtggctgatattctgctgccagggttgtcaggggagatggctcatgcctgttttcccagcattttgggaggccgaagcagaaggatcacttgagcccggaagttcaagatcagcccaggcagcatagtgagaccccatctcttccaaaaaagagaaaaaagaaagaaagaaaagaagctgtccatggtggctcacgcctctaatcccagcactttgggaggccgaggtgggaggatcgtgcttgagcccagaattcgagaccagcttgggcagcatagtgagaccccatctcagaaaaaaaagaaagcaaagattaagattttctcgggaaccctggggaggaagtgtacagagagtgatagtccccgagcacttccacctgcctctgaggtccttccccccatgttgcctcagagggctgaggactatgggcctgtggaggtgatctcccattggcaccccaacatcaccatcaacatcgtggacgaccacacgccgtgggtgaagggcagtgtgccccctcccctggatcaatgtaagctccccagccctgccagctgcctgcagagcctttgagagggtgctcggggtccatctccttgtcttctcctggccctgtccccctgagagagctttccagggctccaccctcccaagctcccaccctgtcctatccccttcccatgtcctctccctctcccacaccaccacccctggggaccccaggactgacttctacacgccagcatcggtccgcaatcaagtgccatccagcccacaaactgttttcaaaaaatgtcttatcacttgccagcttttgaaattgaggcagtatcacttaaaagccacaatttctggcttattttataaaactgggttacatggtcacccacagggcagccgtgggctggagctgagccacagctgcccccttcagtggggacctgcctgccctttgcctcagtcccctctgctgaggtcaaggcaccctttagctcctcatggtgtggcctagaaatgtcccctgtcctccagtctctgtagaggggccctgttgggtctctccagacatctgaggcctgcgggtaccctggcctcctgcccgggccaaatggtgcccctgccccacgtgctgcagatgtgaagttcgacgccgtgagcggtgactactatcccatcatctacttcaatgactactggaacctgcagaaggactactaccccatcaacgagagcctggccagcctgccgctccgcgtctccttctgcccactctcgctttggcgctggcagctctatgctgcccagagcaccaagtcgccctggaacttcctgggtgatgagttgtacgagcagtcagatgaggagcaggactcggtgaaggtgagtgcggccggtgtgggcgggacttcccggtgccttcctgggcgcaagaggccaagaggaagtgtgccaggcctgggctgtgggacctcccgcctggtgctcctctgcccacagtttcacaacctcccaggtcccttctccacagtgaaaggaagtgggcacccagccctccagccctagatgactgggggtcctctccccaggctgttctgttggaccctttgggtccagacctgtcccttcctccttctgtcccagaccttgtgtccctggccctggctccaactctgtgtctctgccatctcactgggtcctgaaatgtcagcctgtgtctgtggcgtgaggctcggctttgcctcctgggctgtcgtcactgttgggtctctgctcctggctcccagtgtcccttcacccactccccgcagcactcccttggcctctgcctcttcccctagtgccatctccccgtctcttctgtctttgtgagtcaccctcctctctctccccatctgcccatctctgacccagtctcctcctggctggcccaccttcagcctccctctacaggcggccccaggggcagccctcgggacaaaagctagtgaaggtgctcctgggtggggacaggctgtgctcacatgtgtcccctgcaggtggccctgctggagaccaacccctacctgctggcgctcaccatcatcgtgtctatcgttcacagtgtcttcgagttcctggccttcaagaatggtaggaacaggaccccagggctagtgagaggctgtgcagggtgggggacaggacctgcccccttcctcctcccctccctccccacatgtcctccccctgcctggggtctctcagccccactctccagaggcctagtgagctggggaggggcagtggccccaaaactcccaacccagaaattcccacccaccgggtgtggagctgagggaggggctggcccgctggtggggcagaggccaggccaatactgccaggaagcagggctggggaactccagagccaagagcagggaagccccggagctgctcccgccaccctgcccggcaggctgcctgctgcgggaggccgcttagggctgagtggacggggcctgcccaagtgggaaggaggagcactgtcccccaaaggtccctaggttctaaggctgaccatactgatggccagcgtttgaggagaagcagccacatgccaggcactgtcctgggtaccctccccagtagctccttgagccctgtgggagccagaggctcagggatgtcacttgcccagtcacacggttcctaaggggcagatggttccagccccaactctcatcttctaggccctgcaggccacttcttccttgcccagagcaccccagtctgaaggagtggcctgcggccctgtagctcccgcaggcggcaagaggaatgagtagtagtattcctggtattaagatgctattgccggcctggtggtggctctcgcctgtaatcccagcactttgggaggccaaggtgggaggatcacctaagccccggagtttgagaccagcctgggcaacaaagcgagattcgtttctacacaattttttttaagaattagctgggcatggcagcgtgtgcctatggtctcagctactcgggaggcttgggcctgaaaggtcaaggctgccgtgagccatgatcacaccactgaactccatcctaggcaacagagtgacaccctgttccaaaaaaaaggacgctcttgccattattgagaactaccatctggaagaatgcagtgtcatacgggcacaggagctggtgccgaccccagccagccatctaccagctgtcgctgggagacgggacccttctgcctaggagctggcttggctggggtccagtgagaaatgaggcacaagaaggctgtcctccccagtgtcatgcagcagggggcgcaggcctcacttggcaccagtgctgtgtggcctccctggtctaaggagaggcttgggcccaactgctcccacgagaacccaccagaaccctgtctccagacccattcttctcagttgggacaggggtcattctgatgggcaggggtgggtggggtgaggctatggagtgtgccagagctctgggatgtgggggagctctgggatgtgggggagctctgggatggggtagggtgcacatggaccagaattcacagccctcactccctgagtgcagagctggccctgactctgcaggactgcagacctggctccaccactgtgctacagacgtggtggctcagcctcctgtggctgcggttagatgctcagccgggcggggtcaagagaggggtgtccgtggtgagaccagggctcagagaggagcatgctgacatggatccttggcagcatctaggcggagcactggaaggagctccagactggagcccagggcccttttcagtttcctgagcatggctgtgagccagttccttcccggtgtcagggcaggggcctggaggaggtggtcttgaagtgcatgccacagatcttccttcccagggagggcgagctggcaccatggtgtggcacagaccccgcgtcccttcagattctgccatgccaggctgtttggcctcagggaagcagcttccctgaccagtccttagcacctggcacgtggtgagccctgtccatggcaccagtcaccgtcaccatcagtcaagggactgcaccttggggtgctgggtgctgacgtcctatgggagggctccaggggtgccgcctgtctggtgctctgggggtcacccaatgaatatgagagccttcctgggagagaggggtctcgttcagcacccctcctgaggacccagccccaccccagggtgtgaggatgcaggccaagggggcctgagggagctgcagtagggtctcagcacctcctcagcctcctggttcccccctaccccctgcgcacagatatccagttctggaacagccggcagtccctggagggcctgtccgtgcgctccgtcttcttcggcgttttccagtcattcgtggtcctcctctacatcctggacaacgagaccaacttcgtggtccaggtcagcgtcttcattggggtcctcatcgacctctggaagatcaccaaggtcatggacgtccgggtaaggctggggcgccatgctgtctcgggagctgcaggggttgggagggggtagtgtggcccagctggaccctggagctggcccccgggggattcccagcaagtgcctcactcccaggactgaggggattttctcaccaggggattttttgggtcacacatggggcaggggaactgggaacggtggggaagggcaggggctggttctggcttgtggggtgggagccagcgtagcaactgaccatggcacccacctcatccacagctggaccgagagcacagggtggcaggaatcttcccccgcctatccttcaaggacaagtccacgtatatcgagtcctcgaccaaagtgtatgatgatgtgagtgtcctgcacagtgggcccctgggggtggtctccaggtaccacgtatccctgaggcacccggggccggccatctgtctgccggacccatgctttacagcctgtgccacatcctctgtgtcccccatctgccataactgcttccctgggcgagtccggagtccccagggctacctggaaattccccctgcccggcctgccagaccaggtgtggtgggtgagggcggggagcagggctgccaggcagggctgaggagctggctgacagccccaccctgtggccccacagatggcattccggtacctgtcctggatcctcttcccgctcctgggctgctatgccgtctacagtcttctgtacctggagcacaagggctggtactcctgggtgctcagcatgctctacggcttcctgctgaccttcggtgagcggtccggccgccccaggagagagcaggccccatgctgcgcagggctcacagccccagtgtaggagacagacccatccccagacagggacaacctagggtgggcagagctgggatatagggaggcccgagggcacacatggccccatctggggtcagagaggacttcagggaggacatgaacagtacgcttcagtcctcattctcagggggcctttgtgtcttgggaacaagtaaacaagtagggccaggtgcagtggctcacacctgttatcccaatgctttgggaggctgaggcaggaggatcacttgagcccaggaattcgtgaccagcctgggcaacttggcaagacccgatctctacaaaaaaacacagaaattattggggagtggtggtgcgtgcctgtagtcccagctacctgggaggctgaggtgggaggatcccttgagtccaggaggttgaagctgcagtgagccatgattacgccactgcactccagcctgggtgacagagtgagaccctgtctcaaaaaacaaaagaccgggtgaatcacagccaatagtgagtactgtgaagggcagagtggtgggaggatgcacattaataggggtccgggggcccctctgaggacaggacatttaaacagaggcctcagatatccagggagagagctgtgcggatgtgacagaaggccccaccagtgcagaggccgctggtagagtgtgcccaggtataggaagtggtagagtgtgcccaggtgtaggaagtggtgagggggctggtatggccagtgcagagtgcacaggggagaggtgggagaggccatccctctgctcatgggtgctctcactgcaggcttcatcaccatgacgccccagctcttcatcaactacaagctcaagtctgtggcccaccttccctggcgcatgctcacctacaaggccctcaacacattcatcgacgacctgttcgcctttgtcatcaagatgcccgttatgtaccggatcggctgcctgcgggacggtgaggcccggtgggcaggtgggagctcccaccggaacagggccctgaggcagtctttagggcccaggcctgagggggtgccacggccccagatggggtgctcagtctgagggggctcggccccgcccttgcatcacgccctctccacccaggcccacctggctgtggacgggccagcccgacctcacactgcctcccacccctctccagatgtggttttcttcatctacctctaccaacggtggatctaccgcgtcgaccccacccgagtcaacgagtttggcatgagtggagaagaccccacagctgccgcccccgtggccgaggttcccacagcagcaggggccctcacgcccacacctgcacccaccacgaccaccgccaccagggaggaggcctccacgtccctgcccaccaagcccacccagggggccagctctgccagcgagccccaggaagcccctccaaagccagcagaggacaagaaaaaggattagtcgagactggtcctcacctgctccggctcctggcgaccactacccctgcgtcccggccccctcgcctcccctccctgtcgccctttccctggacagatcaggccggggcggtgggaggcccgcctcaggtcagggcccagcgtgtgatgtaggggccggggcaggccagggtttgtttgtggaggcgctgtctgtccctctgtccctctgtgtttccagccatctcgccctgccagcccagcaccactgggaatcatggtgaagctgatgcagcgttgccgagggggtgggttgggcgggggtggggccgggcccccctacgggatgcccacggccgttcatcatcttgtccctcgtccccctaccacactccccctcctagaccgccgccctttaacacagtctggatttaataaattcatatgggtgtttaacttaaactcagcactgcccctcctcctcgtgccttccttcctctgttgccttggacaacagcttccagcagggatgaggtggctttcctgggtctgggagagtgacctgacacggtacgggacctgtaaaggtggggattgtgaccttgtgtcaagaaccatacctggccgggcgcagtggctcacacctataatcccaacactttgggaggctgaagtggatggatcacttgaggtcaggagtttgggaccagtctggccaacatagtgaaaccctgtctctactaaaaataccaaaattaattgggaatgctggcaggcacctgtaatcacagatactcgagaggctgaggcaggagaatcatttgaactcgggaggcggaggctgcagtgagcccagatcacacactgcactccagcctggacaacacagcaagattccatctcaaaaaaaaaaaaaaaagccatacccgccaggccaggcctcttcctcacttctcgccctcccaccagccctctgagatttcattaactggcctcatttcagattgctggggaagctgcttgcagggagctcgctgccctataccctttcctgccagctgcccctgctgggtgcaggctggagcctgccatgtgcccgctgaatgtctcctaacccgacaccaccaggcagggccaagtacagctttcagccgggtcgccatgagcacctgccaccctgaggcctcagcacagcagttggggcacgctaaatgtgtgccattggctttttgcgctgacacccactcccaattttggggagcatgggggtgaaggctcagcctgcctgagtggcacctggttggctggctgtagcactctgtgagtgttggggtgtcatatcacatccccggggctgcctgtgctgacaacagaggtggcatgagttggatttcccatcccagcccctggtgctgggactcttcgcccactggataggtgagctgagcgaggcctctgtgttctgagggctggggaccctacattcccaggtttactgttttggggggtggtctcagcaacacttctgggatagggggcccaacgctgaggaccacaccaggttccttcaggctccagctgccaccccatattgcagagccagtcaggggatccatgaggccccagggagacgatggcaccctcggagccccataccacaggtccacaggccatggcagtctcccatccctcagggcagccatgggtctccattacccgccccccaactctataccattccatggatccccggtgcccttggaggaaccccagcctctgcaccatggcctgactgacaggctcctaggaaccccggaggtacagggctctgcagccccttgagactggtgggctctccagccacctggacttcctggcctcgtcacccctggttcttcctcctctcacagctccacgcccaagcctttgacaaggcccatcagctacccccacaactccctgggggtctcacctcttcattgggaccacctgctccacctgctccatgcccctccttaccctgtggtgttcttgctcagtgttctgtctggtcccctgtcccggtcctgccctccccacatcccattcacactctagctagcagctagaggaaactcttttttttctttgagacagaatcttgctctgttgcccaggctgtagtgtagtggtaggatctcagctcactgcaacctctgcctcctgggttcaagtgattctcctgtctcagcctcctgagtagctaggattacagacatgcaccaccacgcttggctaattttttgtatttttaatagagacgggatttcgccatgttggccaggctggtctcgacctcaagcaatctgcccacctcagcctcccaaagtgctgggattacagacatgaaccaccctgcccggcccagctagaggaaactttatagtttattctactaaagcacaaacctgaccctgcccagcccttgctcagaacctactgtgggtgcacagtgacctcaggagaaagcccaggctccttactggggactgagaccttggtgatggggacacttattaacccctgcatccagcctggtcttccccctacctggatcctgcccccaggcacacaacccctgtccacttctttttttctttgagagagtcttgcgttgtcccccaggctggagtgcagtggcacaatcacagccctgcagccttgacctgctggctcaagcgatcctcctgcctcagcctcccaactacctaggaccacaggcaagtgccactacgcctgcgtaattatttatttatttatttagtatttttatttattattattattttttgagatggagtctcactcttgttgcccaggctggagtgcagtggcacgatcttggctcactgcaacctccacctcccgggttcaagcgattcttctgcctcagcctcctgagtagctgggattacaggcacccaccatcacacccggctaatgtttgtatttttagtagagacagggtttcaccatcttggccagtctggtctcgaactcctgacattgtgatccacctgcctcggcctcccaaagtgctgggattacaagtgtgagccacagcacctggccgcctgcgtaatttttaaattttttgtagagttggggtctctcgatgttgccaaagctggtttcaaactcctggcctcaagcagtcctcccagctgggcctcccaaagtgctgggattacaggcctgagccatcacagctggcttatcccttctttatcttacccatgtgtcctccaagctgtggctccaatgctcactcctgtaggaagccctccctgactgccaagttctctggggtctctcatggcagccctgcccactgtgagtcatcactggggacaggttggtctcttccactggatggagccccgtgaggacatagccagacctgtcttgatcactgctgtgtccccagcatagggccaaacacagagaagccacgccaggaatatttaatgagtgcatgttgaacaaccccaacattcactttcccagacacatgaacacatccagaagtgtggacctcggtggggctcatattcagacactggagactgtgacaagcagtcaacaaatgtaacagctgaaccctgcccctgggtagtgccgtgtgctggggtgttttgtgtatacagccaggaccaagacagacccagacctgccgtcatggggctcacagcccagcagaaatcctgagcactgaggatatctgacatgtcctttttaatttttatttttatttatttacttttttttttttttttgagatggagtctcgctctgttgctcaggctggagtgcagtggcacgatctcggctcactgcagccttcgcctgtcgagttcaagcaattctcctgtctcagcctcctgagtagctgggactacaggcacctgctaccaagcccagctaacttttgtatttttagtagagacagagtttcacatttcaccatattggtcaggctggtctcgaactcctgacctcaagtgatctgcctgcctcggcctcccacagtgctgagattacaggcatgagccacggcg[137 bp omitted]gcctcctgaatagctgggattacaggagtgcgccaccacgtccagctaatttttgtatttttagtagagatggtattttaccatgttgatcaggctggtctcaaactcctgacctcatgatccacccgcctcagcctcacaaagtgctgggattacagacgtgagccactgtgcctggcccctttttatttatttgtgttctttttgagatggagtcactgtcacccaggctggagtgagtgcagtggcacgatctcacttcactgcaacctccgcctcctgggttcaagtgattctcctgcctcagcctcctgaatagctgggattataggtgcccgccaccacaccagctaatttttgtatttttagtagacatggggtttcaccatgttggccaggctggtcttgaactcctgacctcaggtgatctgcctgcctcagcctcccaaagtgttgggattacaggcatgagccaccgtgcctggccctgacatgtccttttagtcattcagcaaactttttttttttttttttttttttgagacagtctcactctgtcacctaggctggagtgcagtggcgtgatctcagctcactgcagcctccacttcctgggttcaagtgatcgtcctgcctc[134 bp omitted]ggcctcccaaagtgctgggattacaggcatgagccactgcacccagcctcaacaaacatttttgaggcctggcattggcaagaggcagagaggaatcaggagagcttctggtcctataacaattggagctgctatttgtcatccttatcataagccaagcactagtgtaagtgctgcatgtggttggcttcatccattacatttaatattattcagtgtcctcgtcaccttactggtccatcactctgccctcatctctacccctttcctgtcagtcactctgcaccagccttcttgctattccttaagcatgccatgcatgttcctaccacagggcctttgcacgtgctagcccctgtgctttgaacactctcccccagatatccacatgaatccctcacctcctttgactccctgttcaaatggcacctctcagaccctgatcttcctaacccaaactatcttccgaactccttctcgttatcctgctctatcctgtaatactgccatcaccatcagacataatatttgcttatctgttttccatctgtctcctcacttggatttccttgatggcaagggctttttgtctgctgtgtgccttgctatgtccctagcttttagagcagtgcctgacactgttacgctgtgtgtaataactgtaaattgaagagccaggcacagtggctcacgcctgtaatcccagcgctttgggaggttcgggcagaaggatcacttgaggctaggaggtcaagatcagcct[138 bp omitted]ggtgaaaccctgtctctactaaaactacaaaaaattagccaggcatggtggcgggcgcctgtagtcccagctactcgggaggctgaggagcagaatggcgtgaacccgggagtaggagcttgcagtgagccgagatcgcgccactgcactccagcctgggtggcagaggaagactccatctcaacaaaaaaaaaaaaagaaagaaatagggctgggcacagtggctcacgactgtaatcccagcactttgggaggccaagacaggcggatcacctgaggtcaggagttcaagaccagcctggacaacatggtgaaaccccatctctactaaaaaaaaaaaaaaaaaaagaaagaaagaaatgtagtcccagcactttgggaggctgaggtaggcagctcgcttgaatccaggagtttgagaccagcttgggcaacatggtgaaacctcatctctgctaaaaacacaaaaattaggccaggcatggtggcgcacacctgtggtcccagctcaccagctgtgtggcctcaggcaactgacttcatctctctgagcttcagtttcccgtctgtaaagtgggtctaataataggacggtcatgagtattaaataaaatgatgttaatagttagttgccctttggccaggtgcactggctcagcctaagcaacagatcctctctctacaaaaatagaaaacaggctgggcgcagtggctcatgcctgtagtcccagctacttgggaagctgaggcaggagaatcgcttgaacccgggaggcagagattgcagtgagctgagatcgcaccactgcactgcagcctgggtgacagagcgagactccatctctcaaaaaaaaaaagaaagaaaagaaaagaaaacattagccggatgcggtggtgtgtgcctgtagtcccagctactctggaggctgaggtgagaggatccccttagtccaggaggttgaggctgtggtgaaccatgttcctgccactgcactccaacctcggtgacagagtgacaccctgcctcaaaaaaaaaaaaaaagttcacatttgtatatagcacccacatgtgccaggccctgttctaagaattttgtgttttaaatatttgtgtctattaatttgtgtgaccttggagaaattaattttgccgggtttcagttttctcatctgctatgtggggatcaataacaccatatacttcacacaattgttgtgaacattcaacttacagagttatttctttttctttttgagacaaggtctcactctgtcacccaggctggagtgcaatagcgtcatcacagctcactgcagcctcaacctcccaggctcaagcaatcctcctgcctcggcctcccaaagtattggggttacaggtgtgagccaccgtgcctagccagaacacccaaattttatacaagcaaaggaaagacaacaaaccctgcatctgtggtctgagagcgcctggcatccaacttagaacctaatagatcacctagtcgttctcaggaatatgagaggcttaggaatgtgatctagccaaatggctgcccctctttcagcctgagtcccttctgcaataatcctatcatatgcttctggcgctggtgatagggatgagctcagggtttaggcacacagctcaggatgtatacggaggctacactgctgccattcgcagactgaataactgagcttttgagctcaaagtggtctgggctatttatgggtaactttcaggggctgcagggaggaacaaaccaataaataaaacatccatgcattcatccaataaacttttttttttttgagatgggagtctcgctctgttgcccaggctggagtgcagtggcacgatctcagctcactgcaacctccgcctcccaggttcaagctattctcctgcctcagcctccggagtagctggcattacaggcgcacaccaacacgcccagctaatttttgtatttttagtagagatgggatttcaccatgtcggtcaggctggtctcgaaatcctgacctcgtgatgtgcctgcctcggcctcccaaagtgctgagattacaggcatgaaccaccgcgcccggcctccaataaacatttattgggcacctacggtgttccaggcgctggtctaggcgttggggttacaacaacgcacaaaacataaattctgaagctgacacgctagctttaaacgttccttaaatatcttcatcctcaatttacggttgaggaaactgaggtgtagcgagaccttggaggtttccgaaatattattatggatggcaggtgtagagccctgccaacctctcgatcctgaagctccccttccagcctgagaaacggcaggttcaagtcccactgggagaccaaagcggggagcggctcagtttgccggcttgctcaatgggtaaggcgtgatggctctaagcaggcctcagttgtctcgtccagagcaatgggcagcgacgcctgcccaacccctcctgagcgcccagcctccctttcccggccggccccgcccccgcgatcacgtgacgcgtgggggttttcccgttccccaggcgtgacgtcacggcggggtgcagaccaatgggcgcgcaggccggcggcgccggggaattccgccgccccgcccccgcccgccgcccgcccggcccggccccgcgccccgcgcagccccgggcgccgcgcgtcctgcccggcctgcggccccagcccttgcgccgctcgtccgacccgcgatcgtccaccagaccgtgcctcccggccgcccggccggcccgcgtgcatgcttcggtctgggccagcctctgggccgtccgtccccactggccgggccatgccgagtcgccgcgtcgccagaccgccggctgcgccggagctgggggccttaggtaagcggggctggggttcaggagaggggtctggggcggggctggagatgcggggattctggcggtcccggagtagtctgggggttcctatgggagtctaagggtttcgcgggggcagagtgagggttcctgagacactgtattagggcgtaggaagaaggcagagggtgatgagggggtacggcccgaggttcgagcgaggcgtcccgctgtagagtgagagggggcggggcctgaccctgaggcaaagaagggggcgtggcctgactcagagaaggcggagcgaaagctgctcttgggcggtatcggggcggggccgggcccagagagggagaagaggggcgggatccgacccggactatgagaagagggccgggcctgactcaaaaaaggaagcagggccctacgctgaggggtgagggggcggggcctggccgtgagggcaggaagggggcggggcctgagttggccgaaagaaggggaaggggcggggcctgactctggccgagtggaggggaagggcctgttacccaaaaaagcagggcggggcccgacacagagaatgaggagggggtggggcttgcctccagacggagaagcggagccttgacattgaaaaaattaaaagtggtctgaccctg[137 bp omitted]tgcctcagccccccgagtagctggaattacaggtgcccgccaccacacccggctaatttttgtagttttactagagacggggtttcaccatgctggtcagactggcctcgaacttctgacctcaggtgatccgcacgcctcggcctctcaaagtgctgggattacaggtgtgagcccttgtgcccagcgggatggggactttttaaactgagattgagatggggtcccctccaggcccaactttaagggagaaaaggagcgggccctgagtgtgatgaagggtggggcgaaccacagaaactaaaggccaggacctgtccatgatttagctggtaagcctggccagacgcaggggggcagtcagggcgaggggcctgatccagaggggaagggctagaagaggaaggggtggggcttccttgggatattctctggtcctctggctgccccccatcacctcctgagacgtttctccttctctgcagggtcccccgacctctcctcactctcgctcgccgtttccaggagcacaggtgagcagccctccacagttcctgcccactcgctcatgcaggatgaggttgggaggactccacagagatgtctctgtttgggggttcacgaggtccacctcagctttctcctgacagggtgcatccctccctgccagttgagatgggccccctaggttttcttacctcttggactgttaagagcgtgacaggtggccggg[138 bp omitted]cgtggtggcgggctcctgtagtcccagctactcgggaggctgaggcaggagaatggcgtgaacctgggaggcggagcttgcagtgagccgagatcgcaccactgcactccagcctgggagacagagcgagactccgactcaaaaaaaaaaaaaaaaaaaaaaaaagcgtgacaggtaaatcttaccacctatccatgcgcaaaggcttctttagagattcactgtggcttagtagaaggtaatcactgccatcctgggctttggagctggggtttacatactgctgtcatcgcccctccctgtgtgaatgtctgcaagtcagttccccagttcaggcctcagttttcctcatctgtaagatggacagaataacagtgcctctctttcagggaaattgagagtattcaatgaattgatacaggtacactttccaagcagtatctggcacacagtaagggttcagtaagtgttaactgttagtggtataataataataacgataataattattattactagacagtctataaca[141 bp omitted]ccacctcccgggttcagcaattctcctgcctcagcctcctgagtagctgggattacaggcacccgccaccacaacccactttgtgtctttagtagagatggggtttcaccatgttggccaggctggtcttgaactcctgacctcaggtaatccgcccgcctcagcctcccaaagtgctgggattacaggtgtgagccacctcgcctggccagacagtggttcttttttttttgagacggagtttcattcctgttgcccaggctggagtacaatggcgcgatctcggctcactgcaacctccacctctcaggttcgagcaattctcctgcctcagcctcccaagtagctgggattacagtcatgtgccaccacgctcagctaattttttgtatttttagtagagacagggtttct[133 bp omitted]atcatccatagcgctagttaaaacataatgtcgcctgatgtggtggctcatgcctgtaatcccggcactttgggaggccgaggtaggctcatcacctgaggtcgggagttctagaccaggctgaccaacatggagaaacaccatctctactaaaaatacaaaattagctgggcgtggtggcgcatgcctgtaatcccaaatattcaggaggctgaggcaggagaatcacttgaacctgggaggtggaggttgccgtgagccgagatcatggcattgcactccagcctgggcaacaagagtgaaactccgtctcaaacaaacaaacaaaaaaacagccggccgtggtggctcactcctgtgatcccagcactttgggaggtcgagacaggcagatcacaaggtcaggagttcaagaccagcctggccaatatgttgaaaccccatctctactaaaaatacaaaaaaaattagccaggcgtggtggcaggcacctgtaatcccagctacttgggaggctgaggcaggagaatcacttgaacccgggaggcggaagttgcagtgagcggggatcgtgccactgcactccagcctgggtgacagagcaagagcctccgtctcaggaaaaaaaacaaaaaaccatgtcaggccccacctctcgagtttctgattcagtaggtttgggatgagaaattatttgcatttttagcaagctcccaagagatgcctagaactactagtctataaagtcccccagccaaaattcagtgctgcccaaggaaatgcagaatctcaaccaaattatgacattttttcttatatacatttgccaggatttggagggcaggggtagtcctgttgttatgaatactcagtggctccagttagctgggtctgggcctttctctggagatataatcttgggatggacccaagttctggcttggccattgaagaagtgaggccggttccccaacaggtctgtgagtttagggaggatggcatcagtgacagacactgcccaagcggtggtcctgcgcaggaacaaggctgagacttttcttttttttgagacagagtctcgctctgtcacccagcctggagtgtagtgtcacaatctcggctcactgcaacctccgcctcccaggttcaagtgattctcctgcctcagcctcccgagtagctgagattataggcgtgtgccaccatgtccacctaatttttgtatttttagtagagacggggttttgccatgttggccaggccggtctggaactcctggcctcaagcgatctgcctgccttggcctcccaaagtgctaggattacaggcatgagccaccgtgcccggccaaggctgagacttttctggtccaagacctagatctttggtttcaaatgagagttatttctgatgtcatccattcaataaatatttattatgcgcctgttctgtacctggccttgtgccgagcagtgctgaggacaggcctggccctggggttccctacctagatgaggaggcagacacgtaaacaataagttaaatatgggattataaaatgtgataagggctatgaagaaaccttggggtcaatgatatttaataacagggtggggatacgagaactagtgagatagaatgggaaggaaaattccctttttgtttttggaggcagagtctcattctgtcgcctacactggagtgcggtggcgtgatctaggcttactgcaacctccgactcccgggttcaagccatcctcctgcctcagcctctcaaacagctgggattccaggcgtgtgccaccacacgcagctgatttttgtacttttagagaaacggggtttcaccacgttggccaggcttgtctcaaaatcctgacctccactgatccagccacctcggcctctcaaagtgctgggattacaggcatgagccactgtgcccagcgagaaaatccccttcattgtgaagggccagacatatgctggaccctggggataaaatgaggagaaacagacattattcccactcttcaatgctcccagtctataggagacaggtatgagtcagtgtaatgtgaggtcatgtgacat[132 bp omitted]caaaacctcatctctactaaaaatacgaaaattagctgggtgtggtggcctgtaatcccagctactcaggaggctgaggcaggagaatcacttgaacctgcgaggcggaggttgtggtgagctgagattgcatcattgcactccagcctgggtgacaacagcaaaactccatctgaaaaaaaaaaaaaaaaagaaaatgataaaacaaaggcacctgactttgagggactggagtgggggataaggggactctcttggataaaatggtcagggaagagctgtctaggatgtgacgtttgaccaaggaactgaagatggaggaggaggaagtcacgccatgcaaagaactgggggaagagcattcaggcagagaccagcctgtgcaaaggctgaggcagcacatacatagtcaatttcctgctctcacatctgctctcacgtggcccatcctggctgcccctgaatggtggcaagtccacgttgggggtaaagggaggcactgctatttgagcagaaacttgaataatttcctggctaatagaggacttgagataataataatattaactaagctttctggaagatgtcgcgtggtcagaacctgcactaagtagtttacctgtgtgattctgaatcctcatgttagttcctgaggtaggagctcacacctcattttgtagaggaagctcagagacggtaagtgacttgcccaaggctgcacagccagtgagtaacagctgagattcaaatcaactctatgtgactctacactccatgctctaaaatcatgcccatggccaggcgtggtggctcacacctgtaatcccagcactttgggaggctggggtgggtgggtcacttgaggccaggagttcgagaccagcctggccaacatggtgaaaccccgtctctactaaaagtacaaaaattagccgggcatggtggtacgagactgtaatcccagctactcaggaggctgaggcaggagaatcgctagaacccgggaggcagaggttgcagtgagccaagaatgcaccacactgtactccagcctgggtgacagagcaagactccatctcaaaaaatagaaaataggctgggcgtggtggctcacgcctgtaatcccagcactttaggaggccgaggtgcgcggatcatgaggtcaggagatcgagactagcctgactaacatagtaaaaccccgtctctgctaaaaatacaaaaaaaaaaaaaaaaaaaaaaagccgggtgtggtggtgtgcacctgtaatctcagctactcgggaggctgagacaggagaatcacttgaacccaggaggcagaggttgcagtgagccaagattgtgccactgcaccctagcctgggtgacagagcaagactccgtctcaaaaaaataaaaataaataaaataaaataaaataaaatattaaataaaagtatcttagcccaacaaggtaggcattattattgtgcccattttacagatgaagaagccaaggcacaaaaaggtgaagtaataggcttatggccccacaactagcaagttgcagagccaggatttgaacagaggcagtgaacccagagctccagccacagccgcccaggactcagtctccccctacagcccgggagcctctggagggtccaaagtctaactctgtctttgggtccccaggttcatccagcacagatgcctaagaaggattttcccagttcaagtgacttgaggttggccctgccactgacctagagcgtgtcccttcctctctgccagcctcagtatccccatctgccaaattggggggaccttggcaccctactggcttcacagatcccatgagataaggggtgcaggaaaactacctttcaaggggcaaaggtctggctgccaggagccactccctgagaacagaggaggacagatctagcagcggaacaggttcgcgtctataaatccccagccagagaccagcgcaggcagccctgggtgggacacctggctgcagctgccttccgttgctgtgtgattctaaggctcactggcggcctctgggcttccccttgtcctgtctatggaatgacgggaggtcggtttcgattcctccacgattctgtgaagggctgagctttcctggggaggtgaaaaggggcttccctgaggacccagcattactgtacctcctcacttaggaagcaggggtgaatctgggattttgggtggtcactgtgggaggacagggctggggtacagagcaagaggctgcctgggttcagatcagcctctttgcatctttttgttgttgttgttgtttgtttttgagacagtctcgctctgttgtccaggctggagtgcagtgacgcaatctcagctcactgcaacctctgcctcctgagttcaagcgattctcctgcctcagcctcccgagtagctgggattacaggtgcccaccacgatacccagctaatttttgtatttttagtagagacggggtttcgccatg[137 bp omitted]accctggggtggacttcagggagggaacacaccccaatttgtttggaaatttgggcatccactttttcctggtgctaagacccctttctaatgggttcccaaaaagacttcataatccctggtctaaatgtttttcgggaggcatttggcttagttggaggataccctgatgctgggaccccaacattagaggttgaaaggatggtagcccagaggagaagatgaggtttggggtttagtgccccagcaagtcagagcccagggtttcccaggacggaggaagacggaagggtcacaggagggacagggttggggaatctgtcttaaaagatgaaaagttgtgaccactttctggaccttacctttctctttctctttctcttccttccacagatgaattgggtgagtatcacagggcaggtttgcggggaggctgagggacccaagtgcctacagaagggggtcttggccttccttgttcagtgggggtgggggagaggtgtcactgtgtgacttccaggactgtggagggatttgaacgaagtcatgctcctaaggtacttagcagtgcttgacacttggaaaacactcagcacgccgggggctgtgtgactcacacctgtaatcctggcactttgggaggcagaggcaggaggactgcttgaggccaggagttcaggactagcctgggtaacatagtgagacccccatctctacacaaaatttttaaaaattagccgggcatggtggtgcgcacctgtagtcccagctgctcaggaggctgaagtgggaggatcacctgagcctgggaggttgccttggaagccgaggctgcagtgagctatgattgcaccactgcactgcagcctgggcggcagagcaagaccgtgtctcaaaaagaaaaccaattaaaataaaataatgttattaatcccctagtgagtacagacagacactgttttaggccctggggatttagccatgaacaaaaccaagtccctgccctcgcagagctgatagcccggtgtgggagacagaggaaaatgaacagatgagcaagataatgttagcctgggctgagagctgtgaaagaaataaacaggacgagggagagatggcctggagaagacacattaggttaggcttttctgaagagataacatacgagctgagaccaggaggagaagcagccagcatgggttgaatgggggaccgtgtg[148 bp omitted]ctgcctcagcctcccgagtagctgggagtacaggcatgcaccaacatacctggctcatttttgtatttatttatctatttatttagagatggaatttcgctcttgttgcccaggctggagtgcaatggcatgatcttggctcactgcaacctccacctcccaggtttaagtgattctcctgcctctgcctcccgagtagctggaactgcaggcacacatcaccatgcccaatttttatatttttagtggagatggggtttc[143 bp omitted]ttgctctgttgcgcaggatggagtgcagtgacgcaatctcggctcactgcaacctccgcctgacggtttcaagcgattctcctgcctcagcctcctgagttgctgggactacaggcacgtgccac[131 bp omitted]caccgcgcccagcctattatttattgagagacggagtctcactctgtcgcccaggctggcgtgcagtgtcacgatcttgacttactgcagtgtccgcctcctgggttcaagctgttctcctgcctcagcctcctgagtagctgggattacagacgtgggagaccattcgggctaatttttgtagagacggggtttcactatgttggccaggctggt[133 bp omitted]tgagagagagagagagagagagagagagagagagagagataaatgggatggaaaacgtctcgggggtaatcaagcctttttttttttttttaattttttaaagaatgggcgtcaccacccgttttttcttctcccgcagagatcatcgacgagtacatcaaggagaacggcttcggcctggacgggggacagccgggcccgggcgaggggctgccacgcctggtgtctcgcggggctgcgtccctgagcacggtcaccctgggccctgtggcgcccccagccacgccgccgccttggggctgccccctgggccgactagtgtccccagcgccgggcccgggcccgcagccgcacctggtcatcacggagcagcccaagcagcgcggcatgcgcttccgctacgagtgcgagggccgctcggccggcagcatccttggggagagcagcaccgaggccagcaagacgctgcccgccatcgaggtgggcccggcgagcggccccgggcgggtgggactggggcttcccctgcaccccggagccatccacatgcatttatacgtttatttgatggtggctgttgttgttattgttggaccagatattaattatactatcacctggcctggaatccaaaaggttcagaaaaaaggaggggtcggacatttggctgggcacggtgactcgcgcctgtaatcccagtactttgggagtctgaggcgggcggatcccttgatgtcaggagttcgagaccagcctggccaacatggtgaaaccccatctgtactaaaagtacacaaattagccgagtgtggtggcacaatcccagctatttaggaggccgaggtgggaggattagctgagcccagggaggtgcaggctgctgtgagctgagattgcaccattgcatagcagtctgggtaacagagtgagaccttgtctcaaaaaaaaagaaaaaaaaaaaagaaggcagatcgtggtgcggtggctcaggcttgtaattctagcactttgggaggtcgaggcgagcggatcactcgagctcaggagttctagatgagcctgggcaagacggcaaaaccccatctctacaaaaaatacaaaaattagccaggtgtggtggcacatggctgtagtcctagctacatggtagggctgaggtgggaggatcgcttgagcctaggaggtcaaggctacagtgagccaagatcgcaccactgcactccagcctgagcaacagagcaataccctgcctccattaaaaaacaaacaaatatatataacactggaagtaaaaaaagcaaaggtgattacttttggcagggtattaatgtattaataaggtacaggtaagttttatttttttgagacggagtcttggtctgttgcccaggctggagtgcagtggtgtgatctcgcctcactgcaacctccacctcccgggttcaagcgattctcctgcctcagcctcccgagtagctgggattacaggtccaccaccacgcctggctaatttttgtatttcttagtagagaaggggttttgccatgttggccaggctggtctcaaacccctgacctcaagtgatccgcatgccttggccttccagagtgctgggattgcaggtgtgagccactgtgcctggcctctttggtgtctgttaatctggatctgttcttcaatctgtctttgtgtttcgtgagttgaacatttgtgcagaacaggacggatgttttgtagaatgtcccacattctgaagctggtcgtggtggctcatgcctgtaatcctagcactttgggaggccgaggcaggcggatcacctgaggtcgggagttcgagaccaccctgaccaacatggagaaaccccatgtctactgaaaatacaaaattagtgcggcgtggtggtgcatgcctgtaatcccagctactcgggaggctgaggcagaagaatcacttgaatccgggaggcagaggctgcggtgagccaagatcgtgccattgctctccggcctgagcgacaagagcaaaactccttctaaaaaaaagaaaaagaaaaagaaaaaaagaatatcccacattctgggtttgttggctgtttccagattaggtcagattatgcatttttggcagaaacactccagcagtgatgctgtggccttctcagtgtctcacatcaagggacgtgggatgtcgttattcccaatattggtgatgctgagttggatcctccagctaatgtggtgactatcaggtctctccatgataaagatacaactttccctttgtaatgaattggtaagttatctatgggatgatatactgagatgtatcatcccatgtttaactgtattccccaacttctaatttctaaggcttttttttttttttttttggagacagggtctctctctgtcacagaggctggagtaaagtggcacaagcacggctcactgcagcctccacctcccaggctcaagagaccctcccacctcagcctcctgagttgctgggactacaggtgcatgccaccgtgcctggctaatttttgtatttttttgaagagttggcatctcaccatgttgtccaggctggtcttgaacttctggcctcaagcaatcctcccactttggcctcccaaagtgttggaattacatgtgtgagccaccgcaccggcctaatttctaagtcttcccaggcagttattctggctcagagtttttttttgttttttggttttttttttgatggaatcttgctctgtcacccaggctggagtgcaatggtgcaatctcagctcacagcaacctccacctcctgggttcaagcgattctcctgcctcagcctcccaagtagctgggattacaggcacgcgccatgatgtccggctaatattttgtacttttagtagagatggggtttcaccatgttggccaggctggtcttgaacttctgaccccaagtgatctgtctgcctcagcctcccaaagtgctgggattacaggtgtgagccaccgtgctcggaccccagagttggttttgatttccaagatttagaatggtaaatgcctaaccatagggaatgacctgtctccaaatctggattcaggatttttttttttttttttgagacggagtcttgctctgttgcccaggctggagtgcagtggtgtgatctcagctcactgcaacttccgcctcctgggttcaagcgattctcctgtcttagcctcccaagtagctgggattacaggtgtgcaccaccatgcccagctaatttttgtatttttagtagagacagggtttc[133 bp omitted]agtaggaaactgaggttaaaagaggggcagttacctgcacagggcacacagcaagtttactattgtaattaccgccatttactgagtgcttccatgtaccaggtactttgcatacctattttacacataaagacagtaagacccgagaggtttatcttgtagatggccagtggtagagcctggatttggtgccaggtcggacttattctaaagcctaatgggccaggcatggtggctcatgcctgtgatcccagcaccttgggagactaaggcaggaggatcacttgaggccaggagttcaagaccagcccaggtgacatggcaagatgcccgtctctataaaaataaaaaaattagccaggcgtggtggcatgcgcctggggtcccagcaccatgggaggctgaatggggaggattgcttgagcctgggaagtggaggctgcagtgagccatggtcacaccactgcactccagtctgggtgacagagaaagatgctatctcaaaaaaaaaaaagaaaaaagaaacaactaaagtctaatgttttttccacagtcccaactgacatctcaaggatgaaaagctttcagccctggagtctgcatgagtccgagactgttgactctaagcttttcagaatctcctactattacagcggggagctggttaaatgaatggttttaaccctatctgacccagtgagatttgtagacaatattacctacctctattcacagtcactcccaaagtccatattttattttattttattattattttttttttgagatgcagtctcgctctgtcacccaggctggagtgcagtggcatgcaacctccgcctcctgagttcaagtgattctcctgcctcagcctcccgggtagctgagattacaggcacctgccagcaggcccggctaatttttgtgtttttagtagagacggggtttcaccatgttggccaggctggtctcgaactcctgacctcaagtgatctgcctgcctcagcctcccacagtgctgggattacaggcgtgagccaccgtgcctggccaaaactccatattttacaccaaactgtagtataaaagagaaagaaaaggaaattaatacagcatatataatcacatttatttcaatatgtaaacgccccacaggatatatgaggaaggtggcagttgtttgtgactatatataggctccttgttaatgccgtggccacaaatgcagcctgacccagctgcgcagacttagtgacttatatgtcacacgtgcagggttgcggttggtgaggggattttccaaagtggcgaacaactcttggtctaaacaattagtgtgctggttgcaatctttgaaaattcagtgggtattacagttatgggaaactccagcctgggtgacagagttagacctcgtctcaaaaaagaaaaaggaaaaacaattatgggaaagaatattattggtgtcaaacagagcaagggccaggtgtgatgcatgcctgtaagcccagatgtttgggagactaaagtggaagtattgcttgagtctgggaggcggaggttgcagtgagctgagatcgtgccattgcactccagcctgtgcgagatcctgtcttaaaaacaaacaaacaaacaaacaaacaaatccactcagcaacaatagagcaagtttctgggatctggtcattttaaacaggtttcttattgactcgaatctttggcaggatgttcagaaggcttgctggctgtgggatggctgtgcgggactgtccctggtattataaactgtccagcataactggtcctgtctacttgcggtagggtccacatcagtgtcaaccagccaccccccaaatcccatttttcccctagggggcagcactcccccactgagaccaatggttaatggtattttataggcttgggctttagaagttcagagcaggcttcagaaggtatttaatgccagcagggctgagccagtgactcaaagctgccaagtgggactggccctgcctaacggggctggtttttatttgctgctgcctgtggctgctgagcaaaaattctggcttcacttgctatatcttccttttttaaaaaagaaaaatctggggaggccgaggtgggcggaccacctgaggttaggagttcgaggccctggaggctgggatcgcaccactgcactccagcctgggcaacagagagaatctgtctaaaaaaaaaaaaaacaattctggaaatccgaaataatgtgatgtcttataattttaattgtgggctccaagtttttcctaatcttttacttggaaaaaaaagttttagttttttcctgtctagtttttctttttaagttttattgaggtataattgatgtaagaaaaattgcacatacttaatgtatacattttgatgaatttgttattattcctttttttttttttttgagacagagttttgctcttgttgcccaggctggagtgcaatggtgcgatctctgcctctcaggttcaagcagtcctcttgcctcagcctcctgagttggtaggattacaggcctgtaccatcatgcctggctaattttgtatttttagtagagagggggttttgccatgttgcccaggctggtctcgaactcctggcctcaggtgatccacccgcctcagcctcccaaagtgctgggattgcaggcacgaaccaccgtgcccagcccttttgattagtttggatgataaaagaatttaaacctagagaccaggcgcggtggctcacgcctgtaatcccagcattttgggaggccgaggcaggtggatcacctgaggtcaggagttcgagaccagcctggccaacatggagaaaccccatctatactaaaaatacaaaaattcttggccgagcgtggtggctcaggcctgtaatcccagcactttgggagac[135 bp omitted]gaggcaggagaatggcgtgaacccaggaggtggagcgtgcagtgagctgagatcgtgccactgcaccccagcctggccaacagagcgagactccatctcaaaaaagtaaaataaaataaaaatacaaaaattagccaggcatggtggcaggcacctgtaatcttagctacttagaaggtagagacgagaatggcttgaacctgggaggcaggggttgcagtgagctgagatcatgccattgcactccagcctgggcaacagagcaagactccatctcaaaaaaataaataaataagaatttaaacctacagaaaagttaaaaaataatacactgagtatctttgaaaggtgagtgcctgttatttatttatttttttttaattttttttgagacagagtttcgctcttgttgcccaggctgtagtgcaatggcgcgatctcggctcactgcaacttgtgcctcccaggttcaagcgattctcctgcctcagcctcccgagtagctgggattacagacatgtgccaccacgccctgctaattttgtatttttagtagagacggggtttctccatgtcggtcaggctggtctcgaattcctgacctcaggtgatccacccgccagattacaggcgtgagccaccgcgctcggctgaaagctagtgcctttcatctatattcaccagttgacattttgccacatctgctgtgtctctcattctgtctccgcacagccaaacatacacacacacagatacatacatttttgttttgttttgagacagggtcttgctctattgcccaggctggaatacagtgacgccatcacagctcactgaagcccggatctccagggttcaagcagttttcccatcttagcctcctgagtacctgggactacaggtgcattccaccacacctggctgatttttgtattttttgtagagatggggtctgcacatgttgcccaggctggtcttgaactcctgtgctgaagcaacccaccttccctggcctccaaaaagtgctgggattacaggtgtgagccaccacgcctggccgacacattgtttttttgatgactcatttacaaatgaattgtagccatcatgctacttcacccctaattccttcaggatgtatctcctaatcataagctcctctgtagctacaatctcattaatcacctctaggaaaattagtaatcccatcaaatcatgtaatatacagtccatatttcaatttcccaattgtttccaaaatgtgttttatagttgtttcttcctccttaatccaggatttaaccaaggatcatgttgcatttggttgtcctatctcattagtctctctccttctctctttatttatgtatttatgtatttatttattttttgagaaggagtcttgctttgtcacccaggctggagtgcaatggcacgatctgggcccaccgcaacctccatctccagggttcaagtgattctcctgcctcagcctcccgagtagctgggactacaggcatgtgccaccacgtgcggctaattttgtatttttagtagagacggtgtttctccatgttggtcagcctggtctcaaactcccgacctcagttgatccacccacctcggcctcctcaaactcccaacctcaggtgatccacccacctcggcctcctcaaactcccgacctcaggtgatcccccacctcggcctcccaaagcgtcgggattacaggcgtgagccactgtgcgcagcccttctctccttttttaaaaaaattaagatataattgatcatatatagttaagattaaagctctgaatttttacatataatgtatacatatgtagtttacacagtgtaactacctaccacccaggcacccaggtcacaatacatgatttattctctttctctctctctctttttttttttttcttttttgagacagggactttgtcacccaggctggagtgcagtgacgcaatctgggctcattgcaacttccacgtctcaggcttaagtgatcctcccacctcagcttccagagtagctgggattatagatgcctgtcaccacacctggctaatttttgtattttttatagagacggggttgcccaggctggtcttgaactcctggtctcaagcagtcctcccacctcaacctcccaaagtactgggattacaggcgtgagccactgtgcctggcccatcatttgttgtctttt[144 bp omitted]gcctcccaagtagctgggactacaggtgcccgccac[190 bp omitted]tggtggctcatgcctgtcatcccagcgctttaggaggccaaggcaggcagatcgcttgagttcaggagtttgagaccagcttgggcaatgtagcgaaactccgtctctactgaaaacacaaaaattagccaggcatggtagtgtgcgcctgtagtcccagctactcaggaggctgcggcaggagaatcccttgagcccggaggcggaggttgcagtgagctgagatctcccgccaccgcactctagcttaggtga[177 bp omitted]catggtggtgggcacttgtagtctcagctactcgggaggctgaggcaggagaatggcgtgaacccgcaggcagagcttgcagtgagcggatccagcctgggcgacagagcgagactccatctcaaaaaaaaaaaaaaaaaaagcctgagtggcctaaaaaagcagcctgtagggcagatattatatgaggccccccagttcatcagttggaagcttctggtttaggatatcaaagtggcctttttttttttttttttttttgagaccgtcatattctgtcacccaggctggagtgcagtgtcaagaactcggctcactgcatcctccgcctcccaggttcaggcgattctcctgcctcagcctcccgagcaggtgggattacaggcatgcgccaccatgccgggctaatttttgtattttcagtagagactgggtttcaccatgttagccaggctggtctggaactcccgacctcaggtgatccgcccacctcggccttccaacgtgctgggattgcaggcgtgagccacctcgcccggcccaaagtggtcttaagcaaacacattccatcatcctggtcgcgggagaaggttggggagctcccaacagaggaccctagtggggagaggattggggagctgccaaggaaggccccaaggagtttggatggacgcaggcatcggtgatgggacccccaaagaggacttctcttcctgcagctccgggattgtggagggctgcgggaggtggaggtgactgcctgcctggtgtggaaggactggcctcaccgagtccacccccacagcctcgtggggaaagactgcaccgacggcatctgcagggtgcggctccggcctcacgtcagcccccggcacaggtacccaccccctgacctccgacctctcatccttgatcatggagattctaagcgactggaggccacccatgaaactttagagcagagggcagcttgggtaaaccctccccactgcctcttctaggtgggagacaggcctggggacagtggagggcctcacttaggcctggagccttgccacacacatattcacatacattttatccctattttgtagaggaagaaactgaggctcagagagggtaaggagcacagataattgatgacagagctgggatttgactgcagacctgacttaactgcaaggtctgttctttctcttactttacaattcatctttttttttttttttttgggacggagttttgctcttgttgcccaagctggagtgcaatggttcgatctcagctcactccaacctccacctcccggattcaagtgattctcctgccccagactcccgagtagctgagattacaggcatgcgacactacacccagcgaattttttggatttttagtagaaatggggtttcac[131 bp omitted]taacttttattttgcatatgtccacaaatgcttacacaacatacagtggctacatctaaaactttgagcattttttcatagtgcaaagagacagaaaggtagtgacacacttcactgtgttacactgactttgggtagagccctaaaggcagcacgcacttcagaggtagggctgagtattgctcacactcaggtctggaagatttaattttagaaatttttaaacttagtgaaaatataagttccgagagcagagatcttgtctcttacattccctgctgtattccgagtgtctggcatagtaactggcacatagtaggtgctcaggaaatatttgtggaatgaatgaatactgccatgttatgcaatttacagacccatcagtaatgggtgagagcacctgattctccacaacctcaccagcaccgagtattatgaaacattttgatttttgctattttgatgagtgccccaaaacaaaggcatcttcattggtgtttaatttgcagttttctttccttccttcct[132 bp omitted]gtgattctcctgcctcagcctcgcaagtagctgggactgcaggcgcccaccaccacacccggctattttttttgtatttttagtacagacggg[135 bp omitted]ttgagaccgagtctcactctgtcacccaggctggagtgcaatggcacgatctctgctcactgcaatctctgcctcctggattcaaacgattctcctgcctc[412 bp omitted]gcctcccgagtagctgggactacaggcacccgccaccatgcctggctaatttttttgtatttttagtagaggcggggtttcaccgtgttagccaaggtggtctcgatctcctgacctcctgatctgcccgtatcggcctcccaaagtgatgggattacaggcgtgagccaccacgcccggcctgaagttttcctattaaagatgaagttggccagtgttctcacatggtaaagataaggcatgttctggatcttctcaagaacctttgacatgcttatttttattttttgagacagattcttgctctgtcgccaggctgaagtgcagtggcatgatctcatctctctgcaacctctacctcccgggctcaagcaattctcctgcctcagcctcctgagtagctgggattacaggtgtgcgccaccacacccagctaatttttgtatttttagtagagacagggcttcaccatgctggccaggatggtgtccctctcttgacctcgtgatctgcccaccttggcctcccaaagtgctgggattctacagatgtgagccaccacgtctggccaaaaggtttattttattttttattgtttgagatggtgtctaactctgttgcccaggctggagtgcagtggcacaatctcggctcactgcaacctctgcctcccgggttcaagtgattcttttgcctcagcctcccgagtagctgggattacaggcatgcactactatgtctgctaatttttgtatttttagtagagacagggtttc[132 bp omitted]taatgctgggacccctgggcctgggatgtcagcccctgagagcctgagccccacagcagcatctgccagagccctcctgcaggttagggccacacttgcctgctcacgagcactcctctccctcccccgtcaccccctcagttttaacaacctgggcatccagtgtgtgaggaagaaggagattgaggctgccattgagcggaagattcaactgggcattgacccctacaacggtgagcaccccctgcctgacctgaccatcccgtcctcccaaaccccttgacttccgtgctcaccctggtcccctcaccactccaggccccaccgtctcctccagccccatcccttccccgttcccctgtaccccagagagggtctccacttcccaccctcagcctccccatatctcccccgacagctgggtccctgaagaaccatcaggaagtagacatgaatgtggtgaggatctgcttccaggcctcatatcgggaccagcagggacagatgcgccggatggatcctgtgctttccgagcccgtctatgacaagagtgagttgagagtgctgtggccgttaggattgcccttggctgcaggtgtcagaatgtcccgcttacagaggcatgaatggctcaggcgctgtggctcacgcctgtaatcccaacactttgggaggtcgaggtgggaggattgcttgagcccaggagttcaagaccagcctgggcaacttggcaaaaccctgtctctataaaaaatttaaaaattagctgggtggccaggcacggtggctcatgccggtaatcccagcactttgggaggccaaggcgggcaggtcacctgagaagtcaggagtttgagaccagcctggccaacatgccaaaaccctgtctactaaaaatacaaaaattagctgggcgcagtggcaggcgactataatcccagctactcaggaggctgaggcagaagaattgcttgaacccgggaggcggaggttgcagtgagccgagatcgcgtcactgcgctccagcctgtgcaacagagtgagattgcatctcaaaaaaaaaaaattagttgggcatggtgacatgcacctgtagtcccagctactttggaggctgaggtgggaagattgcttgagcccaggaggttgaggctgcagtgagctgtgatcatgccactgcagtccagcctgggcaacagagcaagtggtgaaatcctgtctctactaaaaatgcaaaaattagctgggcatggtggcacacgtctgtaatccctgctacctgggaggcggaggttgcagtgagctgagattgcaccactgcactccagcctgggcaatggagagggactccgtctcaaaaaacaagaaaaaaaaacatcaaacccaaaatggaatcttctagtgttgtagaatgaacaatctgtacaactataccaggcagcccaagggaagaggcagcataagtaataatctctctccctttctgagagagtgcattatattccacagaatcaccctggtagacttctgcttatttttcagtggccagagcttggtcccatggccactcctagttgcagggtggtctgggaaagcaagtgcttagatttttcaccctctatagagggatacaggcatagaagaggggactgggaataactggtaggttttagccaacccatagtgactgctgtaagcatcaaaatgggatattaattcagtcagggcatttatggatgcaagtgatagaatcccaacttagccgggc[137 bp omitted]cgtcgtggcgggcgcctgtagtcccagctactcaggaggctgaggcaggagaatggcgtgaaccctggaggcggagcttgcagtgagccgagatcgcaccactgcactccagcccgggcaacagagcgagactccttctcaaaaaaaaaaaaaaagaatccttacttaaataggcttaagggggaaaaaagagaataagttattctatttgttctattaacgagaaaaaatgcagatgtagcatagtgcttcaggtctggctgcatccagggcctcagtgatgtcattagatatctgtctctttctgtctctcagctgttcttcctccatgttagaatccatgcttatatcctacctgcctggcacctctccccgactcccaaagctgcttttagcttctcttacctaatagctttgcttaaagtctcaggtctatctctcattggcctggttttggtcatttgctcctttttgacaaatcagctttggccagagggatgcactgctctgattggccaggtctggggcatgcgctcaattactgctgagctaggaagtgggctcagccctgcccaatcccagttactaagatgaggggtggtcccttgagggaaaattggaggctgttaaaagaagaggggtcaggactactagatggggaaaacaacaggtgtccactacatgattacagtctatcaaactctcctcaaggaaccttctctcacctgggaccccatcaactctccctgaggtctgagggtctcccttaaacattttttaaaaattatttttattatttttttttagagatagggtctcactctgttgcctaggcagtcatgcagtggtgcagtcatagcttactgcagcctgaactcctgggctcaagtgatcctcccagttcagcctcacaagtagctgagactacaggcatgtgccaccacacctggctaagttttatttttaaaactttgtagagctagagtctcaccatgttacccaggctggtccagaactcctgggctcaaacgatcctccctcctcggcccctcaagtgctggcattacaggtgtgagccatcatgcctggcaattttttttttcttttttgagagagatgggggtctgctatgttgcccaggctggtcttgaacttctggcctcacgtgatcttcctggctgggcccccaaaagtgctgggattacaggtgtgagctaccttgcctagcaaaggatcttcttttgttttgttatttttttgtttgtttgttttttgttttgagacggagttttcctctgtcacgatggagtgcagtggtgcaatctcagctccctgcaacccctgtctcctgggttcaagtgattcttctgcctcagcctcctgagtaactgggaccacacccagctaatttttgtatttttagtagagtcagggtttcaccatgttggccaggctggtctcaaactcctgacctcaagtgatccacctgcctcggcctcccaaagagctgggattacaggcgtgagccaccatgcccggcaaaagatcttcgttttggacagacactcaccgggcttcagcttgagggctggcgattgttcgttaaccccttctgtccgagtgacttctttctccacctggactatgggttccatgaggatcagatgccctgccttttcaattccctacgtctccagggccccggggatggcacccactgggtgcccagtaaggctttggtgactgaattctcgggattttttttaatacacttcttcctcttgctccttcccagaatccacaaacacatcagagctgcggatttgccgaattaacaaggaaagcgggccgtgcaccggtggcgaggagctctacttgctctgcgacaaggtgcagaaaggtgaggggcctggggcagcaagcttgggcagagcggggtctggcaacttggaggggtagccagggagcccgggaagatgaaaggatgagaaagagctggttaaccagggcaccagagtgcaagggtccagaacactgtctttgcagtcagacacagctgatgggttcattcactccctgagtcgccttctcacccgtctgcgtaggacgacagagactcgtctgtggtgacccatgctgcaagctaggcggtgccatcacagagctcacgacatgtccagaggactctgatgttaagggtggaattgcataaatgaacgctttacggtggttctgataagcgctatgggtaaagcaaataggacaggagaagcaactccacttcattcatctctgttcaaatggcccttcctcaaacaggcttttaaaaaaaaaagacagctggtcaccgtggctcaagcctgtaatcccagcaatttgggaggctgaggtgggtggatcacttgagctcaggagttcgagaccagcctgggcaacatggtgaaaacccatatctactaaaaatacaaaaatgagggctgggcgcagtggctcatgcctgcaatcccagcactttgggaggccaaggtgggcggatcacctgaggtcaggagttcgacaccagcctcccaacatggtgaaaccccatctctactaaaaaacacaaaaatgagctggttgtggtggcatacacctgtaatcccagctactcgggaggctgaggcaggagaatcgcttgaacctgggaggcagaggtttcagtgagccgagatcacgcctctgcactccagcctgggccacagagcaaagctctgtctcaaaaaaaagaaaaaaagaaagaaaagaaaaagacagctgggcacagcagctcatgcctgtaatcctagcacagttttggaggctgaggcgggcagatcacttgaactcaggagttcgagaccagcctgggcaacatggtgaaaccctgtctctacaaaaaataaaaaatttagcaggtgtggtagtgtgcacctgtagtcccagttacttgagaggctgaggtgggaggatcacttgagcccgggaggcggaggctgcagtgagccaagattgcaccactgctctccagccagggcgacagagacagaccctgtctcaaaaaatcaaaaccaaaaacaaaccggctgggctggtggctcatgcctgtaattctagcactttgggaggctgaggtgggaggatcacttgagcccaggagtttgagtccagtctgggcaacatagcaagcccccatctctacaaaaaaaagttctttttaattaaaaaatagccaggcattaggccggctgtggtggctcacacctgtaatcccaatactttgggaggccaaggtgggcgaatcacttatggtcaggagttcaaaaccagcatggccaacatggtgaaaccctgtctctactaaaaatataaaaattagctgggtgtggtggaacacacctgtaattccagctacttgggaggctgaggcacgagaatcacttgaacctgggaggcagaggttgcagtgagccgagatcatgccattgcacaccagcctgggcaacacagtgagactctgtctcaaaaaatgaaataaaatagccaggcatgttggggcatgtgcctgtagtcccagcacttgggaggctgaggtaggaggattgcttaagtgcaggagttggaggttacagtgagctatgatggtgccaccgcactgcagcctgggcaatagagcgagactctgtctcaaaatagaataaagtaaagtgaagaaactggttccagagatatctagtaacttccccaagttataacagagttggtagtgaagagttctagccttcctgggtttccatcttggctctaacacttgccagctgtgtgaccttggacaagtgacttcacctctctgtgccttcattttcgtctttatacaatacggtacctaatagtaccttcttcatagagttgttgtgtgacttagaggcaatctatatgtaactgacacatataaagtctcagtacatggaggtactgtgatgacgggcgatgcagtaagacaagaaaaataaatagcaggcagagtagcatcatgaatcctgactcttccgctaccagttgtgtgatgtctcaacactttcaagcctcagtttccgtttttgtttttttttttaagaaccaggctctcgctctgtctcttaaatagctgggaccacaggcgtgcgccaccatgcctggctaattttttaattttcttgtagagacaaggtcttgctgtgttggccagtctggtcttgaactcctggcctcaagtgatctgccagctttagcctcccaaagggctgggattacaggtgtgggccactatgcctggacaggcaccttttttctctgctgactgtgcctggtatccttttgccataacagatcatagctgtgagtatgactgtatgctgtcttgtgagtcctcttactgaaccacctgagggtgatcttgaggatccctggacatgagggggatattaattcttttgtttgtttgtttgaggcggagtcttgctctgtcccccaggctggagtgcagtggtgcgatcttggctcactgcaagctccgcctcccgggttcacgccattctcctgcctc[136 bp omitted]gcctcccaaagtgctgggattatgggcgtgagccaccgtgcctggcaagggggatattaattctacctacctcttaaattgttataaggattaaatgagataatatatataaaaatacataaaacaaggccgggtttggtggcttacatctgtaatcccagcactttgggaggccaaggcgggcagatcacgaggtcaggagagcgagaccatcctggccaacgtggtgaaaccccgtctctattaaaaatacaaacattagctgggcgtggttgcacatgcctataatcccagctactcgggagactgaggcaggagaattacttgaaccagggagttggaggttgcagtgagccgagatcatgccactgcacttcagcctggaggcagagtgagactccatctcaaaaacacacaaacaaaaaaaaaccaaaaataaaattagccgggcgtggtggcatatgcctgtaatcccagctattccggaggctgaggcaggagaattgcttgaacccgggaggcagaggttgcagtgagctgagatcgcgccattgcactccagcctgggcaacagagcaagactctcaaaaaaaaaaaattttaaaaagggggaatattagtcttgattttaggggaggctgggcaagttgggagcacagtggtccagatgtcctggcttagctgatgtcccccgtttcctgccagaggacatatcagtggtgttcagcagggcctcctgggaaggtcgggctgacttctcccaggccgacgtgcaccgccagattgccattgtgttcaagacgccgccctacgaggacctggagattgtcgagcccgtgacagtcaacgtcttcctgcagcggctcaccgatggggtctgcagcgagccattgcctttcacgtacctgcctcgcgaccatggtaactacagcaacccagggtgacccaccacctcggagactaggtctttggccttggggagaccccagtggggatgggaaagaggcagaactagaatgcaggctcagagctacaaagacagtgttcagatcctggctctgctgcttactggttgtgtgaccttggcctctctgagcctcattcttctgtgcaaaatggaaataatagtagctgtcctgtgacatttggagagtatttaatctttcctcccctcagcatcctgcacatgcccgggcctgtgctcggtattgctagagacacagcagtgaccagcacggcccctagctgtgtcctcatgaggcttatagtcctgaggataggggacagcctgtccctacagagtgatgaccagagtgggcaggactggaatgaagtgctcaagggctcacattgcccagagggggtacctgacccagctgtaggtgtcagggaatgcttcttggaggaggggacagctgagctgaggacaggaggatgactaagcagggaagttttctagggaaatagtgagagtggaggaagagtgctttaaacagctggaacagcaggtgcaaaggtcctgaggccggattgtgcctggggtgctccaggaacaacaaagaggccagtgtgtaggccgggcgcagtggctcatgcctgtaatcacagcactgtgggaggctgaggcaggcggatcacctgaggttaggagttcgagaccagcctgaacaacatggcgaaaccccgtctctactaaaaatacaaaaattagccgggcgtggtggtgggcgcctatagtcccagctactcgggaggctgaggcaggagaattgcttgaacccgggaggcagaggttgcagtgagccaagattgtgccattgcactccagcctgggcaacagagcaagactcactacaggcacccgccaccatgcccggctaattttagtatttttagtagagaccgggtttcgccgtgttggtcaggctggtctcggactcctgacctcaggtgatccgcccacttcagcctcccaaagtgctgggattgcaggagtgagccaccacgcccagccaagactccatctttaaaaaaaaaaaaaataggcctggcacagcagctcacacctgtaatcccaacacttcgggaggccaaggcaggcagatcacttgaggtcaggagttcaagaccagactggccaacatatagtgaaatcccatctctactaaaaaaatacaaaaattagctgggcgtggtggcgcacacctgtaatccctcctacttgggaagctgaggcaggagaatcacttgaacctggcaggcagaggttgcagtgagccaagaccgtgccactgcactccagcctggtcaacagagcaagactgtctctaaaaataaataaataaataaataaataaaggaattaattattattgatgaattacttcttgtgtgtccctggtatctccttaacagacagctacggcgtggacaagaagcggaaacgggggatgcccgacgtccttggggagctgaacagctctggtgtgtgccctctgcccctttccacccccatccccaggttctggggaggggacagctgaccccactgccctgtcccaccccaggctggggaggaagggctgtcggggaacaggggtcctcatctctgccttccctcagacccccatggcatcgagagcaaacggcggaagaaaaagccggccatcctggaccacttcctgcccaaccacggctcaggtgggtcccagctacacataagcccctgtcccctgggtgggcagagggtaagtggcagccctgcttttctggcctcttcacgccctccaagagcagccacaaggcgagtcactcagcacttagccagcaacatagagtagaaagaatgagggctttggagacagaatggaagttctgatctcttctgggccatttccttgctatgtgaacttcattaagttgttctacctctcagagcctcagggactcctttgaaaaggcccagtacatacttagctcagtggtgttttaaaatttgatctatttcttctttctttttttttttttttggagatggagtctcgctctgtcgcccagactgcagtgcagtggcatgatctcagctcactgcaacttctgcctcctgagttcaagcgattctcctgcttcaggctcccaagtagctgggactaaaggcatacaccaccacacctggctaatttttgtattttttagtagagacggtgttttaccacattggccaggctggtcctgaactcctgacctcaggtgatctgcttgcctcagcctcccaaagtgctgggattacaggcatgagccactgcatcccacctatgatcacatttaactgcatttacagcaaaacccaaaataacaggggcttcaacaggatagaacgttatttcttgtctcacatacatagtctgtagggactgaaagtggctcatgcctgtaatctcagcactttgggaggctgaggcaggtggactgcttcagtccaggagtttgagaccagcctggccaacgtggtaaaaccctgtttctactaaaaatacaaaaattagccgagtgtggtggtgcacacctgtagtcccagctacttggaggctgaggcagacaaatcacttgaacccaggaggtgaaggttgcagtgagccaagattgcaccactgcactttagcctgagcaacagaatgagacccttctcaaaacaacaacaacaacaacaacaaaacaggcctggcactgtggcttacgcctgtaatcccagcactttgggaggccaaggcaggtagatcacgaggtgaagagagagagaccatcctggccaacatggtgaaactccatctctactaaaaacacaaaaattagctggatgtggtggcacatgcctgtagtcccagctacttgggaggctgaggcaggagaatcatttgaacccaaaaggtggaggctgcagtgagccaagatggtgccactgtgttccagcctgtcaacagagcaagactccgtctcaaaaacaagaaacaaaaaacagtccataggtaggtgttccagggatggtctggtgactgcatgatcatcgagagaccgaggcttctgccattttcagttcgccaactcatggtgcaaggtggctgttgtagctccagccattacgcccacgttccagttagcagaccttagtcacatgatcacatcaggctgcaaggaaggctagaaaatagtcccttgtgtctctaaggtttgtcttgttccaaaaagagagtccctctttttttttgagatagtcttgccctgttgcctaggctggagtgcagtggcacaatctcagctcactgcaatgtccacctcccaggttcaagtgattctcctgcctcagcctcctgagtagctgggattacaggtgcccaccaccatgccctgctaatttttgtatttttgggagagaaggggtttcgccatgttggc[132 bp omitted]tattttttcttaagtccccattatgcctgagaatgacatttattttttctgacaattttgggactggtgacttcccaacttgtgtctcccatggtctggagatttcactttttgggttgtctctgtatgttggggggctttggaacctcttctcctttctcactctcagggaaaactctccacagctgtgtaggagcatggtttcaaccccagttccacaacagctgtgtgagccttccatttactttccctcagtgccttagtttacttattattaattatttttagagataaggtcttgctctgttgcccaggctggagtgcagtggtgtgatcatacttcgctgcagcctcaaactgggctcaagcaatcctcctgcctcagactgccaggtagctgggactacaggcgggcaccaccacacccagctaacttttaaataatttttttgtagagacagggtctcgtcacgttgtgctgggattacaggtgtgaaccaccacgcttggccttcaatttacttattatctgagaatggtgatagtcccacacggattctccttgggattaagagggcacctaaggccaggcttggtggctcacacctgtaatcccagcactttgggaggccgaagcaggtggatcacctgaggtcaggagttcgagaccagcctggcaaacatggtgaaaccccgtctctactaaaaagataagaattagctgggcatggcacatgcctggcctgtagttccagctactcaggagactgaggcaggggaatcaacttgaactggggaggcagaggttgcagtgagccaagagcacgtcattgcactccagccagggtgacagaatgagactccatctcagaaaaaaaaaaaaaaaggccaccttgatatcacattttgcagggagtagggcatttgatttagggcctgatcagaagttagccctaaatcacactacacttctcttgtcttcatccccgtaggcccgttcctcccgccgtcagccctgctgccagaccctgacttcttctctggcaccgtgtccctgcccggcctggagccccctggcgggcctgacctcctggacgatggctttgcctacgaccctacggcccccacactcttcaccatgctggacctgctgcccccggcaccgccacacgctagcgctgttgtgtgcagcggaggtgccggggccgtggttggggagacccccggccctgaaccactgacactggactcgtaccaggccccgggccccggggatggaggcaccgccagccttgtgggcagcaacatgttccccaatcattaccgcgaggcggcctttgggggcggcctcctatccccggggcctgaagccacgtagccccgcgatgccagaggaggggcactgggtggggagggaggtggaggagccgtgcaatcccaaccaggatgtctagcacccccatccccttggcccttcctcatgcttctgaagtggacatattcagccttggcgagaagctccgttgcacgggtttccccttgagcccattttacagatgaggaaactgagtccggagaggaaaagggacatggctcccgtgcactagcttgttacagctgcctctgtccccacatgtgggggcaccttctccagtaggattcggaaaagattgtacatatgggaggagggggcagattcctggccctccctccccagacttgaaggtggggggtaggttggttgttcagagtcttcccaataaagatgagtttttgagcctccggggtttcgtctgttctgggcttgggaaacgccctagtcccttagtagcaaagaaagcctccaggctgggggctcaggcctgtcatcccagcactttgggaggccaaagcaggaggatcgcttgagctcacgagtttgagaccagcctgggcaacatgacgaaacctagtctctacaaaaaatacaaaaattagccgggcgtggtgctgcgcgcctgtaatcccagctactctagaggctgaggtgggaggatcgcttgagcccaggaggtggacgttgcagtgagccaagaccgcaccactgcactccagcttgggcgacagcgcgaggctgtgtctcaaaaaaat[131 bp omitted]gaaaccccatctctactaaaaatacaaaaattagccgggcttggtggcgcgcgcttgtagtcccagctactcgggaggctgaggtgggagaatagctgaaacccaggaggcaaaggttgcagtgagcctagatcgcgccactgccttctagcctgggagacaaagagagactccgtctcaaaaaaataaaattaaataaataaataaaataaaaaagataaaaagataaagcatccaagctcttcccttctccgctctcccacttcttcctcgggatcccgcccctctcgactctaggacccgcctctctcgtcggcggaagtgcgctgcgcggccctccaccatgctccgccccctccccctagcgcggcctttcatttccgcttccggtgcgggccgcgcgcgagcgcagcggtgggaggcggcgaccagccggtgagtgcaggctgcggctcgacctcccggttttcgggcaggcctcagcccagcttctccctttcctcaggctctccccatgctgctgtgggcttctgctgcgtcccggccccgaggatcgctcgtccctcaccccattaggcctgacgggcctcaggccgagcccgtgccccggctgtgggccagaagttgccgcgtcgaactcggccttcggcccagcagcttatcacaggccccgcccccttgtcaaaaaaaaaaacaacaaaaaaaaaacccagcccaaatcctcaggccgcgacgcgatccacaagccccgtccaaaccttcggtctccgccctttcccgcaagccctgcccccaagctcagcccacgccctcctgtcagccagctccgcctctctcaggctctacgctctttttctttggatgctctccccaccccgccatctagatcccatctttagacctcagcttcactctggtctccttgcaacactccctccccgtgttcccactccctctagcatcttcatcttccgccacgcccttcacctgtcctcgacctccaccttcatacaactgcactgttcccttaaaagctttctccgatttcctccacctgccttcatccttattctccttatccctctaccacccagactcatacccaaccccacgcatggcccctagtgggagccttttcagttcttctctttctcttgagctccagccttaagtgctcagggtttgccttctgaccctacttcaaacactgctgatgtttcaaaacctttcattcccgactccagcgcgtggaatctaggacacccctttcccagtgatgctcacctcagaatcacctgagggtttttcagaatgcccaagcttctagatcgaagttgttagggatggacttgaacatctggcatactgttctgcagcttcacttctgctccctgaagctaagagatgtgttgtttgggatcgactctgccaccaacttgttagatgactttgattctgcccatacgggtttcacagaccatctgactttcctggtcccttcatccctcaggttgaggccccaggcttggcctcaccacaatgtggcacgaggctcggaagcatgagcggaagcttcgaggcatgatggtcgactacaagaagagggcggagcggagacgggagtattatgaaaagatcgtgagtaactggccttttgtctggggtgagggaccctgggttggggggcacagctggtcatcctggtaaaatctgggcttggaagtatgtcaagacaagaggctcatttcctcaggagtatattcattaatcttttcttgaggataatcattggtgggatcccaagggcttctgtttgttgtagcatactgtgtcgtttggtgtggcctcccagtgccgatccggtgttagcaagaaaaagggaagtctctgtaaccctcagagcagtcctgacgttagactggccacctccagaatgtctgtttcgcttattgctgtgttccccattcccagaagagctcagccactcttgagatttggcttggcacacaataggagtgagtattaagttggcctggcacagtggctcacgcctgtaatcccaagtggatcacctgaggtcacgagttcgagaccagcctggccaaaagggtgaaaccccatctctactaaagatacaaaaattagccaggcttagtggtgtgtgcatgtagtcccagctacttgggaggctgacgcacgagaattgcttgagcccgggaggaggaggctgtagtg[134 bp omitted]aaaccccatctctattaaaatacaaaaaattagccaggtgaggtggcgggtgcctgtagtcccagctactcgggaggctgaggcaggagaatggtgtgaaccggggaggggggcagagc[133 bp omitted]cctctcctgtctgatgcttcagttgtttttgcggggaagaccaaactatccctggcctaaaagacccttgtggtctgaccactcagcttcatactcggacagctccactggccttctatttctgccaccacagggctttggcctatattaccccccctcacctatttaactcctgtgtatccttgggatcccagcttgaaatggcacctgttttctaggttcagtgttcctgtcagatgacatttatatagacctttcccagttattcctgtattactgccccagcctcctccctggtctgctggcctccagtcctggctcctccagtctgtccttcctagaagagtccaagaggcctttctaaagcacaaaactgaccctgtcccttcgttgctcagagcacctctatgcctcctaagtgcccttgagagaaagcccaggctcctcactgtggcctttagggtcctgcatggcctggcctttgcccttcctccagactcacaccaccccacactctgccttgttcctttgcacaagtcattttggcctccttgctattcctccactgacccaagcgctccccagccacaggacctttgtatgagctcttcccatacctggttaactactgcttatctgtcagatctcagtcctcagagaagtcttgtttcccaagctcagtcaggtgtcctctaaaaatgccataatcatagctccctttccttcccctttgtggaatttaacacacttaagatacacatacatgggcctggtgtggtggctcacgcctgtaatcccagcattttgggggccaaggcaggtggatcacctcaggtcaagagtttgagaccagcctggctaacatgatgaaacctcgtctctactaaaaatacagaaattagctggaggtggtgaggagcctgggctttctctcaagggcacttaggagccatagaggtgctctgagcaatgaagggacagggtcagttttgtgctttagaaaggcctcctggactcttctagggaggacagactggaggagccaggactggaggccagcagaccagggaagaggctggggcagtaatacaggagtaaatggtaatcccagctactcgggaggctgaggcaggagaattgcttgaacccgggaggcataggttgcattgctctccagcctgggcaacagagtgagactccatctcaaaaaaaaaatttatatatatatatatatgtgtgtgtatgtatgtatacacacacgcacacacatacgcatacacaggttgaacatccctaattcaaaatccgaaatgctccaaaatctttttttttttttgaggcagagtcttgcttagtcgcccaggctggagtgcagtggcatgatgtcagctcactgtaacgtccaccccccaggttcaagctattctcctgcctcactcaacctcctgagtagctggaattacaggcatgtgccactatgcctggctaatttttgcacttttggtagagacagggtttc[143 bp omitted]cccactataagtggaaagtttcacatataagtactttacacaaactttgtttcatgcacaaaattatttaaaatattgtatacaattaccttcaggctgtgcttataaagtataaatgaatttggtctttggacttgggtgccatccctaagatatctcattatgaatagacaaatattccaaaatctgaaaaaatctgaagcacctctgatcccaagcacttcagataaggaatactttgtgtgtgtgtgtgtgtgtgtgtgtgtgtgtgtgtgtgtgtcccgtctctactacaaatacaaaaaattagctgggcgtggtggtgggcacctgtactcccagctactcgggaggctgaggca[137 bp omitted]tgcacatacccagctctgtgagactggggactaattatatttgggtcacgtttgtaccctagggttgggtccatcaaatatggtttgaaagaatagatgaataaaacaatattaacaatagtaattaaccatttaattgatccttcgcaggcacccccaggccatgtgagagatgcaggattttttttgaatccccacagtcacctgtgagacagagaccgctcttacttccactcagcagagaagaggaagctctgagagctccttgcttacctctgccacccaggaaggaaccacggggctaaagggagaactcatctccgatagtgtcagaaagatgtgatcatcaaggcaaggcctgggtctctgttggtcatagttgaggccccagaagtggcctaggaacacagcactcaggaatgaatagctaccttttttttttttgagatggagtctggctctgtcgcccaggctggagtgcagtggcacgatctcggctcagtgcaacctccgcctcccgggttcaagcaattctcctgccttagcctcccaagcagctgagactataggtgcccaccaccacgcccggctaatttttgtatttttagtagagacagggtttcaccatattggccaggctggtctcaaactcctgactgcaagtgatccgcctgccttggcttcccaaagcgctgggattataggcgtgagccaccacacccagcctagctgccatttattaagggcccatggtgcgccagacccagtgctcaccagcttggcatagtagtcctctgaacaggcctgcgaggtaggtattgatcatgcctgtgttaaaggtgatgccacgataacagctaacgctgttgggcagttctgtggtaaccactgtgctaactacttggcttgtgtctccgcttcatcaaagccacacccaagactaggaggtggttcttactatttccattttacagaggacaaaactggagcacggagatacgtggcttacagtcacatagcatgagggcagagctggcactataacccagtctctgacccttaacctctctaagcttttcacctgcgccttatcatgcagaaatagaggttcaaaaagatgaggcatagcaagaccccatctctgcaaaaaataataaaaaaaaattagccaggtttggtggcatgcgcctgtggtcccagctacttgggaggctgaggcaagatgagacctgggagggtggggctacagtgagctgtgattgcaccactgcactggaacctgggtgacagagtgagaccctgtctcaaaaaagaaaggtgaggtgacttgcccaaggcaacacagccaggaggtgagatcccatcatggttagtccttagaatttgggagtcatggggctctgggttcaaattctagcgatcccacttatctatagtgtgacgtgggcaagtgactgcctccctgagcccatttcctcttccacatgtgaaaggatgtcacatggacaatcagctttggctctaacaaacctagagcatccgtcagtggcttaaacaagatagatgtttatttcttagccacagaaaagccaagaggtaaccagttagctcggggacctaagccgcttctgttttgttctcctgggcacagcttctcttcctagtgttgcatcgaggtctaagaggctctggccatcatgtcttcattctatccagcagggaggaaaaagggaggaaaaggggcaaagcgctcatgccatttgttgagaaagtttctaggccaggtgcagtggctcacgcctgtaatcccagcacttcgggaggccgaggcaggaggactgcttgagcccaggagttcgagaacagcctggacaacatggtgaaaccccgtctataccaaaatatacaaaaattagccgggcatgatggcgtgcatctgtggtcccagctcctcaagaggctgaggtgggagaatctcttgaacccaggaggtggaggctgcagtgagctgtgattgtaccactgcactccagcctgagtgggagaataagaccctgtctttaaaaaaaaagtttcgggatgttttcccgtaacatttccactcctcccctgctgaccaggaagtagtcttatgaacagccgtgaggaaggctaagaggtgtagactttattttgggtcgccctgaccagatatatttggagttctgttactgttgtagcaaagggaatagatgttggttgccaattaatggtttgccactaacagtggagacaagagcatgtccttcgatgttgttggagtgttggacacatggaccactgagagcagcctggccagcgtcgctatcgctcagtaaatattagctcttgttattgacattactgttgctgatagaactggagtttggatccaggtggagggatggtgcagaggaaggaaggctggagctgagactccaggccccctccctgttagcagggaagcttgctgcattgtattccccctcaggacagtggtgacgaccaacccctctcactggataatggggaagagctcaaagaaccaatgtctatgggtgctttgtggtgcaggcctgtacaagcggcctttgtccctgtatgtgaacgtgacctgcattccgatctgggctgccaagctgtggagtatggctgggccgtggctgatggctgctttgaggaggggactctcatctcagccttgggccgagagcagaggctgtggagcgagtgtcagtgaagctgcggtagattgtggcaggctgaatgagtatgtccagatgcagttggtttctgtcttcctgatttgtcgttggtgcctgctttctctccctgtcttcagtcccaagcagactccggttctgtcattgcttctgtccttgtcaactttcctttttaatcagtggtttggataaagaaacagaatcctctgttgatacggaaataagaagtaaacaggtcgcagctcaggcgtcgcctcctccaggaagctccagactgacccccaagtctgggtcaggtgttccccctgtgggcccccatctcagcgctgtccactctaggttgtccttgtatggggacaagtctgtgtcccacactggactgtgagcccatgagggcagggccagggctatctcagttactgccataccctagcacaaggtctgcttaacagttgaatgaatgaatgaatgaatgagtaacttcatgaactcctctgacacaatctgatcctagagacaggataatccagtggttaagagttggttttgggccgggcgcggtagctcacgcctgtaatcccaacactttgggaggctgaggtgagcagatcacctgaggtcaggagtttgagaccagcctgaccaacatggagaaacgtcatctctactaaaaatacaaaattagctgggcgttgtggcacatgcctgcagttccagctacctgggaggctgaggcaggagaatcgcttgaacccgggaggcagagattgtggttagcctagatcacgccattgcagcccagcctggacaacaagagcaaaactctgtctccaaaaaaaaaagtggattttggatcttgaagaggtacttatacacttatgttcattacagcattattagcaatagccaagaggtggacgcaagctaaatgtccattgagggatacatcgagaaagaaaatgtggtctctacacataacgcaatattattcaatcttaaaaaagaaagaaatcctgtcctatgctacaatatcgatgagccctgaagatgttatgctaagtgaaataagccagtcgcaaaaagacagtattgtatgatccgctgataagtatctaaaatagttaaaccttgcttgagcccaggagttccaggctgcagtgaactgtgatcacaccactgtactccagcctgggtgacagagcaagactccatctcaaaaaaaaaaaaaaaaaaaacagagagagagaggaagggaggaagggagctcacttcggcagcacatatactaaaattggaacgatacggggattagcatggccactgtgcaaggatgacacaaaaattcgtgaaaccttctgtatttttggtaaagaaaaaaaaacctaaaagaaaagtcaaaccctcagaaaaagaaaatacagtgcaggttgacagggatggggggaggaggaaaggggaagttcagttttgtttcagttttgtaagatttaaaaagttctaaagctctgttgcaccacagggtggatgtagttactactactgtactgtacacttaaaaatgttaagatggtaaatgttttctaccacaataaaaaaattattcttggccagatgtggtggctcacacctgtaatcccagcattttgggtggctgaggcaggcagatcacctgaggtcaggagttgaagaccagcctggccaacgtggtgaaatcccatctctactaaaaatacaaaaaattagccaggcaggttggtgcatgcctgtactcgggaggctgaggcaggagaatcgcttgaacctgggaggcggaggttgcagtgagccgagatcatgccattgcactccagcctgggcaacaagagtgaaactcttgtctcaaaacaaacaaacaaaaaattactcttaaaaagcaaataaataaaaagaagcagattttgtagtcaggcccatctgggttcaaatcctagttctgcttattcctaatgtcaggcaggtggaccccatggctttgagcctcagtttact[155 bp omitted]caaaaaattagccaggcattttggtgcatgcctgtactcgggaggctgaggcaggagaatcgcttgaacctgggaggcggaggttgcagtgagccgagatcatgccattgcactccagcctgggcaacaagagtgaaactcttgtctcaaaacagacaaacaaaaaattactcttaaaaagcaaataaataaaaagaagcagattttgtagccaggcccatctgggtttgaatcctagttctgcttattcctaatgtcaggcaggtggaccccatggctttgagcctcagtttact[133 bp omitted]agccctgtctctactaaaaataccaaaattagccaagcgtggtggcgggcacctgtaatcccagctactcgggaagctgaggcaggagaatcccttgaacttgggaggcagaggttgcagtgagccgagatcgcgccattgcactccagcctgggtgacagagcgagactctgtttcaaaaaaagaaaaagaatagtatgtttcttccatggttgggacattcgagtgagacagtgcacataaaacagtgcctggtttttagtagggttcattgacttttccagaatctcccaacagaaccaggctctggactcctggtgtttactcccggctcagtgcttattcctttctgtgaagctgaccctgccagtagcttccctgtacctgccaaattctgtcctgcaaacagtgtcccatgagtcctggctgtgggaactgggcatttggcctggagcagcctcaggagtatgatgggatcttggccttggacttggctggcttgtcccagggcagagggagctgggtgcgctgtgtggccccagctgaggaatcagctaaggaatcgagggaggcaggcgaggtgcagcatgagtagctggactccagcagcgccacctcgctgggcctgtggtcttgagtgttccttagactcagtttctttaggtgtgaaatgagagtcacagcagcccagcacctggcacatagtgagtgcggggttgaaactagccaggtattagctgtggtcctggtgagtgactcagctccttcagcccggactgcaccttctcatctgctggctgagggctgagatggagacagagtgaggatgtgcaggagcttggaaacttggagctggtgtttttttcctgaaggggctcagagtcttcatctgttagtaaggattattcctgtctttccttcattgggtgttctcaagcgcctgctgtgggccaggccctgttctaggctttagggatatagcagccaaaacagagccctgcctcctgggagttacgttctaacatgggagaaaggtgatgaatgaatattaggtccagtggcaggtggtagcgggtgctcaaaagaaaacaagtggagttaagtgagtgaattgtgtggtatatgaattacttctcaataaagccacagagtgaaggagctggggtagataagtggggagctatttagatagagtcactgaggacggcttttaggaggagatctgaaataagcgggggagcagaagcacagaggtccgagcagaagcacggggcatgtctggaatgcccaaggaatggcgtgaggcgagggcctgtgtgcctggagcagagtaggggagggaagaaatcagagagggacaggccagcacctgtgagggctgagtggttgggagtggggtggggggtggggtgcggcccaacatgtgtcagcaaatctcctggaggcagagcccagcctggaccagactgcatccacacattgaaagatgaccaacatcattagccatcagggaaatgccagtcagaaccacaagataccacttcacccacactaggctggctgacatggaaaggacagactataacaagtagtaggccaggcatagtggctcatgcctgtaatcccagcactttgggaggccaaggcaggcggatcacctgaggtcgagagttcaagaccagccagaccaacatggagaaaccccatctctactaaaaatacaaaattagctgggcatggtggcgcatgcctgtaatcccagctactcaggaggctgaggcaggagaatcgcttgaacctgggaggtggaggttgcagtgagctgatatcgcaccattgcactccagttgaagatcctgatttctctatattcttgtcactacttgtgttttgttttgttttgttttgttttttgtttttggagatggagtctcgctcttgtcccccaggctggagtgcactggtgggatctctgcttattgcaacctacctccacctcctgggttcaagcgattctcttgcctcagcctcccaaatagctgggattacaggcgcctgccaccatggctggctaatttttttgtatttttagtagagacagggtttcaccatgttggccaggctggtctcgaactcctgacctcaggtgatccgcctgcctcggcctcccaaagtgctgggattaccggcgtgagccactatgcccgacccactgcttgttacagtctgtcctttccatgtcagccagcctagtgtgggtgaagtggtatcttgtggttctgattggcatttccctgatggctaatgatgttggtcatcttcccatgtgcggatgcagtctggtccaggctgaagtgtccacaccagtctctaaatgaacggcccggaggatgggaggtgaagagttaagggggctgatattttagagagcgaggtcttcgtactggctatgcagaagattgagccaccacctcgagaggaaccaatagcttatttcttcaatttctttttttttctctttttgagatggagtcttgctctgttgcccaggctagagtgcggtgacacaatctcagctcactgcaacttctgcctcccaggttcaagcgattctcctgcctcaggctcccaagtagctgggattacaggcatgtgtcaccacgcccagctaattttttgtatttttagtagagcctgggtttcgccatgttggtctggaactcctgacttcagatgacctgcctgccttggcctcccaaagtgttgagattacaggcgtgagccaccatgcctagccaattcccttatttctgaaggttagcaggttggttcacctctgaggtatggcccacttgaccttagaagtgagcttgctgcaggccgggcgcggtgactcatgcctgtaatcccagcactttgggaggctgaggcgggtggatcacgaggtaaggagatcgagaccatcctggctaacacagtgaaaccctgtctctactaaaaacacaaaaaattagtcgggcatggtggcgggcgcctgtagtcccagctactcagaaagctgaggcaggagaatggcgtgaacctgggaagcagagcttgcagtgagccgagacagcaccattgcactccagcctgggcgacagagtgaggctccatctcaaaaaaaaaaagaagtgagcttgctgctaagctcggttgtgtgtgagggggtggggtttggagctctgttgggtggtgacctcagtcctgtttacccctgcagaagaaggacccagcccagttcctgcaggtacatggccgagcttgcaaggtgcacctggattctgcagtcgccctggccgctgagagccctgttaatatgtaagactgatatggaaggcaggggagtgtctgaagtctgggagtcaaaacggacctggggtggtgtagagtgtggagcagagactgaagtatggacagacctttggggactcagaggcagggaaggtgtgacccgcatatgaaggtgatagtcacagggtgtaagaacaatgagcaggggttggggtggaggccccagagtagcagtcatggttggaggacttagaaatgggtggagccagggccagaggcccagaggaagcagagagtaggttgccagacccgagctggctcagggtgcctggggcccgcccctcaaataccctctaggacctggttcaagttccccactattgcttggttgtgagaaatggggccctggtgtccccaggggcagtcagatgactggcctgtttcaggtcccaggagcctgaatgtggattcagggaggcttgcaacagaagggactgagagctgggggttgaggtgagggtcatggcatggggaccaaagcaggctgagggccaggcttctaagcctcagctggcagggagcaggtgctttgtgtcctgggcagtatggaccctgaggttcttgctttcttgctcccctcccacttcaggatgccctggcagggggacaccaacaacatgattgaccgattcgatgtccgtgcccacctggaccacatccccgactacaccccccctctgctcaccaccatgtaagccacctcccagggggttgccaggcacagcgtcatacccaggagcccctgttcttttcccagcctacctgtcaccttcctaggagccgttcctatttggtaccgccctgagcctgagggggatgcctcatttcccttcctgctggcttggggggggatccactccttctctctgatttcaaggtctcgcccttccctaaagctccccagaacaggagtcggacgaacggaagtgtaactacgagcgctacagaggcctggtgcagaacgactttgccggcagtgagtgatctgtggggggacgtggggtgtggggtttgagcctggagcctggaagacctagataggtttgggaagaaaagttttatccacatactttctactaaagggccttgggttccggctccagctctacgatagactcactttgcctgcatctctttccccttctagatttggtataggggatgtctgccgaatgggttgttcccagcagagtcacgtccatataccatgccttctgactctgtggtccgtttttctttaaaaaatagagaaaatagcaagaatatgtttttatttttatttatttatttatttgaggcggagtttcgttcttgttgcccaggctggagtgcagtggtgtgatctcagctcactgcaacctctgcctcctgggttcaagtgattatcctgcctc[131 bp omitted]accttggcctcccaaagtgctggattacaggtgtgagccaccacgcccagccaagaatacgtttttaaaagcatttagaaagatggggtctcactgtgttgtccaggctggtctgaactcctgggctcaagtgatcctcctgccttggcctcccaaattgctgggattatagacatgaaacactatgcccagccaggaacagattttttacctctgtgtattttactctgcccgcacagatcagattgtgagctctaaaaaggaaatttctccttgatttaaatgaatatttgccagcatttgacaatttgccaagtgttcatgtatgtccaggaattttctcccagcccagccttatcaccattgtcattttccaaatgaggaaacagaggctcagggaaacttctcgctgctctgggcttgcccagggaggtttggatcccaacagacttgggcttttttgtctgtattatcattacatctgcacaaccacctagcaaggtaggggtgacaccccgttttggggttttttgttttttttgagattgagtcttactctgttgcccaggctggcatgcagtggcgcaatctcagctcactgcaacctccacctcctgggttcaagtgattctcctgcctcagcctcccaagtagctgggattaccggcgcatgccaccatgcccggctaagttttgt[167 bp omitted]tgtccaaggagctgggattctccacgtgtccttaaccactgctccctgttgatggaaagctcctaactcacctaccaagaaggacttgagattccctttcttgggattccctgtggagttaagggaaggatggagttctctgctgggtttgtcccttaccacctggcaggtctcggcttcctcctcgagaagggtggtggtgttgattttgttgcgtggggtggttgtaagagttgagtgagatgatgtgtataaaaccccagcaccgagcctggcacagtcagccctccatgtgggtttgctagtccagtatttgtttatttctaagatagatgcttttttgattttctaaaatcagaggctgccaaaattctagtgatcactgaggccttagaatcagggacatgtgttataattgatactgtttttgccatcattccaggccacatggcttcctggtggtagagccagggttccccttagtttcgcctcactctgcatttattcattcacttccacaaacagtcattgaacacctgcggtgtggcaatggtaggggagagggcagcagctccataatcaatgtcagtgatgccaattgcaaaccaaggtgatgtgacagacagtgtgccattctctgagaaaaataggacagaagtcctggatagaagctccctgggaggcacggataggccacaggattccaggccgagagcagcctgtgcaaagccctgtgtcagccaggactgtgagcacactggaggggcagagagaaggcccgtgtggctggagcagggagagcgagggcgcttgtgcaagacagggtcagcagggcctctcttgggctttggagacaacaagtagaaattggggtatctgctagaacaaggaagggccgtgctacatccccttctggcctgccagcctgcccacctcttgttccagatagaaaagctgaggccagccgggcacggtggctcatgcatataatctcagcactttgggaggttgaggcggtggatcacctgaggtcgggagttcgagaccagcctgaccaatatggagaaaccctgtctgtactaaaagtacaaaattagccaggcacggtggcgcctgcctgtaatcccagctactggggaggctgaggcaggagaatcgcttgaacctgggaggcggaggttgcggtgagccaagatcgcgccattgcactccagcctgtgcaacaagagtgaaactctgtcttaaaaaaataagaaaagaaaaactgaggcctagggagggaaggaaggaaggggacttacaacccactgtcccacagcgagtcagggacacgtgtctcactgcagggaagatcaggaaggctctggtacattgttgagtcccccaggctgggtgttgggggtgcaggagagcccaggtcatcccagcccacacctaacttaaaatgagccacagagaggcatgcagtggagtgacctgtgcagtcagaatggcgtgtggcactcaggagcaggttatggttctgaagggtccagccagaggcctccagaaacagtgagaatggtggtagagtgcccaagtaccaggccaggcactcactctgcccgtggtcccattttacggaaaaggaaactgaggcacagatgtgttaagtcccttgaccaaggtcgtgtgtccaaggctctgctgcagttgcttgtgtcccaccagacatagtttgattatctggaagtggtgactgccccccaaggtgcactggggttgcacctgtcttcctgccccaccgcacccttgtgttcccccactgaattcctagtgtccccaacccactctgacctggggtctcttgtttgctgcagtctcagaggagcagtgcctgtaccagatctacattgatgagttgtacggaggcctccagagacccagcgaagatgagaagaagaagtgagtcggggtctggggtgcagggggttgaggaggcaggagggctgggagccccagccaggcatggcctcttccatcctgtccaccagggtctccccgaaaccaaggatggtgttcagcacacagtcagtgctcaattaataactgtgtagaggaagaagccctgtcagggggccccggcttgccgagggctctgcgttacattttcagcttgggaagtggtgggaggtgcaggccctgtggtgagacagccctgggtttgagtcctggctgtgaggccctgagtgggaattgtctgagccttgctgtgcttccctgtaaaatggggctggcaggaggccctactgcctggagttgggaggcatgcaggagatggggcttgtgaagtacctattccagcacctgccatgtagtgagcttgcagtcagccctagctgatgtcactctggagagaggcttcttaaagccgcgtccctcaaggagtagctggggagacccgggccttatcctggagcagctgcctctgaggagcagtggccgagcagtctcacttctctcttctccacctcagtctgatgagtgcaggcctcccgccctcacacacgctattccctctgcagggcttagctctcctccaggccagctgctgttgccctggtgcacggtagcctggagccctggctcggggctgggcagctccctcagtgacaccttccctcctgctacccctgactgcttgccgccttcctccactgggaggggtcccatgggactgtactgggagcttcttggagacttcagccctcgtccacggccccagcctcaggatcctgctcaggccctgctctgttcagggcaaagctggggcacctggctgctcaggaggactctgggctgtgcccttgtgggactcatggtctaggcgggagacagaccttccccaacagagatgacccaacaaaggcagggctggggagctcaggacagtgctgacccaccctagggtaccagtcaaggacttcttggcaggtggggccctagagctcagatgtggaggaagagggaggagctgggtgtgggcaggagcagagggtcctaggctgagggagagcctgaggggagggggccgtggcactcgagactggtgtgtggggctagcctggggccctcatctccactgggcacggccctggcttaccagctcccctttctcaggctggcagagaagaaggcttccatcggttatacctacgaggacagcacggtggccgaggtagagaaggcggcagaaaagccagaggaggaggagtcagcggccgaggaggagagcaactcggacgaagatgaggtcatccccgacatcggtggggtcccctctctgccctccccacctgcagtccctgggcatcgtttctgtgtctcgtccctcaccctctgtggggcaccccgtgcttacgaaccgtgtctctctccctaccccgccccagggcacaccagcctcctgctgcccctgtctcactcctgtcctcctccgttccggccttcctctgcctcactcatctctcatttctagggtgctatttctatgatcttttcccctcctaggtgttggctccattctcctccacttgggccggcctctctctgcctttgcccctctctcctgctctcttccctcctctggaaaacaagtgttcatcctcttacagagtcagcccccatccgccaggcatctgttcaccctcctctctgccattcacctcccctctggattcccactgatcaaaccacccccaagtctctctgtttttctcatcctggttcttactccagcaactggctctttttatttatttatttatttatttttgagatggagtcttgctctgttaccgggctggagtgcagtggcatgatcttggctcactgcaacctccacctcctgggttcaagtgattctcctgcctcagcttcccaagtagctgagactaaaggcacacgccaccacgcccagctaatttttgtacttttagtagagacgggggtt[131 bp omitted]tggagccacacattgacctccgcccagccctccttcctctggcttatcacacgccctgcttccaaacacctgtgacccacaccctgcctgccacccaccgtgatctccagccgccatctttccgcccctgttcagtcctccctctcacgtcaaccccaccacacgcctcactcatccattcctccctccctccatccacccatccctccttccttccttgcctccattccattcatccatccatccatccctgcatcccttcatccatccctgcacccatccgtccatctctcccttctctttccctccctccgttcatctgccccttcaagccctgtccccgagctgcctctgtccactgtgtgttgtgctcacctctggcaagcccagtgccagcctagggcatgccaagatgagccagacttgatgccatcccttcctgaagaatccctcagtctggcgggcgccccatcatccccgcctcctggagcactgccccttctcccctgtcctctcgctcggccgtggctcctgacagcctttctcttggtgcagacgtggaggtggacgtggatgaattgaaccaggagcaggtggcagatctcaacaaacaggccacgacttatggcatggccgacggtgacttcgtcaggtgaggcctgcctgctgacacccctacccattctgtgggccccaccctggcatctcactattactcccggtattgacagccatcctgtttgtgagcatttgtgtgcctggccctgggcccaggactttacacatgcaggtccctgagcctatggtggtcgtggccccacttcatctgtgcagaaacaggctgcacccaagtcacccagcctgccctacttagtgcgacctggggcgaatctgactcttcgaagctctggggattcctaggctgggggacagcgccctctagtggagaggcttcattccctggttatttatcctggcagttgctggttgtacctctaccctgagccacaccccctgctgagctcacaagaccacacagaatggtcccagctcactgggcagtgaaccagaaacggagcctgagcatggcaccctctgcccagagccctttgtggctcccacctccctcaggaacatccagtgtcctcaccatggccgaaaggtcttacccatctggtcctctcaaccgccaccatcccccgctgcccagcctgcacagtctccttgctcctcaagtgcagaggcctgggccagcccctgggccactctgtctgctgttcgctttggacgtctgcagcttgctcccccaggtttttctctagataccctgttttgtgtggcttccctgagctccctcttgaaaactgcagcttcctctgcctttgctctaccatctaatggaccacacattttattcccttgctcattatcttctcccctagaatgtaagcccgtgcaggtgaggatttctgtttttttttttcagtgctcagttcttgatacctaagatagcacctggcacacagagggtgcttgataagtggcattgaatgaaagatacctcaggctggcgtggggtgactcaggtccctcactttctctgatgactcagtctgtgtcctccttaccctgtggcctgccccatcctccaccctaattctcacccacctctataggatgctccggaaagacaaggaggaggcagaggccatcaagcatgccaaggctcttgaggaggagaaggccatgtactcggtgaggtctgggctggagtggaaggggacaggggtgtgtcacagggagggcaccccctcaccaacctggcacccaccctactccagggacgccgctctcgacgccagcggagagagtttcgggagaagcggctgaggggtcgcaagatcagcccacccaggtagggcttctccctgaacccccaccctgctggcatctgggggaggagagcaggggcttagggcctgagaaagctctttggaggcaggcatttgacttgagaaaggagtctttctagtggggcgatgcatggccatcgtgaaggtttagaggtaggaacggccttgagggccatgtggactcctttccttgccagcccctcccctcaccctactggactgggggcccttgccagactcccaggagcccatgcacaggcggcataaggctctcaccaaggcggcagagagggcacaggctttgccctggactctcacccagttctgctgcttggcttcttcctgtgtcggagtttggacaagtgacttcccgaactctctgagcttcaattttttcctttggaaaacaaggcattatcacctacctggagagagggctgggcagtccccacagggaggtcttgggacaggtttggatgaggcaggctggcttggagaggaaagcccagcctgggtcaggaggccttgaggagaggccctgtgcaaacccatgcctctttttgccacatctcttaaaggagagtgactgagagttcctgtaaggcttaaacaacttgtaggttcagcggttggtatcggaaacattccttaaagaatagcaccaatcgtcattgctgtcagcggtggcacagaggcacacagagggtagtgcaggaacgcccaggctgggtggccatagggcctgggtttggatcccagtttcctcctttatgagctacgtaatgctggacaagtgacttcacctctctgggcctcagtttcctcagctgtgatagtctctcttttttttttcttcccccagagacagggtcttattctgtcacccaggctggagtgcagtggtgtaatcacgactcactgcagcctcaaattcctaggcttaggcgatcctcctacctcagtctccttagtagctgagattactggtatgcgtcaccacgcccagctaattaaaataaaaaatacttagtagagatggggttttgcggtgttgcccagg[133 bp omitted]cccggacccagtgagagccagagacaaggattgggaggagggatgctttcattctagggtcaggaggccaagcagaaccagagctgctgaagtccaagttcctcagagtcatgatgggtctaggacattgtagggtggggcttaagttcatgctttggacagatctgaggtgggggtgggtggaggaattaaggggaggcccccaacctggtcagcagccccctcactgtgccaggtacctagctttgggtcctcaggttggcgggcttatcccaaattcatgactgctgagatcttaagccctaatttgtcccaccccattcttttctctgtagctatgcccgccgagacagccccacctatgacccctataagcggtaagttgctctggaggaccagggaatagcagacagggagcctcctgatggggacaggggtgctgaggaggggatgggaggttcaccctgctaggccaccccaagatcacagactgcatgatatgttctgggtctgaatcatttttgtgttttccagatcactgtcttgttttcccagttttaaataaaattttttttttgagacggagtctcgctatgtcgcccaggctggagtgcagtggcacgatcttggctcactacaagctccgcctcccaggttcacgccattctcctgcctcagcctcctgagtagctgggactacaggtgcccgccaccaggcctggctaattttttgtatttttagtagagtttagtagggtttcaccg[137 bp omitted]tttctgatttaaatacagtgcagccttgtggtaaaaatgaccaaatatggcaaaacagtgtgactgagaaatcaagtcactttaatctcaatttccagaagtggccagtgggaaataacgggcactcagtagcaccgctgggcacaggtcgttgtctcgtggatgaaagagtggttggagaagggattttgtgagggaccaagctcagtctgatcccagtccccctcatccaagctccatagctctctgaagcccagttccctcttcggaatgggggtgggaatgggatcttcctcatggggctgtgggtcgaggttagatgagataaggtgttgaatggcttctggggaaataaaaggtgtaggttagtgctccatacatgggagtgtcaggaatatcagatactttctttttatttttaaaattttatatattaaaaaacacgtttgttttttttttctttaaaatattgagatggggctcaccatgttgaccaggctggttttgaagttctggcctcaagcagtcctcccacctgggccttccaaagtgctgggattacaggcatgagccatcacacctggccactttgtttttattttactaaaatagaattgcaccacactcagtgttttagaacttgctttttcctcccagattatccatgtatcttttgagtaaaacttttctgtgttttgtacagagatctgcttatctttttttttttttttttttttttttttgagacggagtctcactctgttgcccaagctggtgtgcagtggcgtgacctggactcactgcaacctctgcctcccaggttcaagcagttctcgtgccctcagcctcctgagtagctggaattacaggtgcgcgccaccatgctcggcaaattttttttgtattttttgtagagacagggttttgccttgttggccaggctggtctcaaactcctggtctcaagtgatcggcctgcctcggcctcccacagtgctgggattacaggtgtgagccaccgcgcccggcctgctcatccatttttcatagccacataaaatcagagcagttgtgtgtcattgtccttcctggttatttagcgaaggctgcatggttgtgagtcaagtccttgtccagagctgggtctccactgccctccaggctccatccacccgcctggtttcccgggtcgctgtggcccgcgctggcgctgctgttgatctgctgtgtgtgctgttcccgaagaggctccgggagcctgagctagtgagcctcctcctccctacccgcaggtcaccctcggagtccagctcagagtcccgctcccgctcccgctccccgaccccgggccgcgaggagaagatcacgttcatcaccagttttgggggcagcgatgaggaggcagccgcagccgctgctgccgcagcagcatcaggagtcaccacagggaagccccccgcacctccccagcctggcggccccgccccgggacgtaatgccagcgcccggtcggtaacgctcacgccgcccgccctacgccccggtcaccatggggggtacccggggcagaggggggccgcggctcaggcctgcgctgaccggccctccgtgccccgcctgcagccgccgctcctcctcctcctcctcctcctcttctgcctcgaggacctccagctcccgctccagctctcgctccagctcccgctctcgccgtggtgggggctactaccgttccggccgccacgcccgctcccggtcccgctcctggtcccgctcccgctcccgctcccggcgctattcccggtcccgtagccgtggccggcggcactcaggtgggggctcccgagacggacaccggtactcccgctcgcccgcccggcgtggtggttacgggccccggcgcagaagcaggtgtgtgtggctgggcgtggaggtgggaggggctgggggggcgcggtctccgatcctggggagaaggtgctcagagggaggaaacctggccgtccagctcagagaacaccccatctaaggggacaggcacaggccactgctcttccgcaggaagcccttggttggaaagggcaaggcatgggtgtttgcgtgcgcgttctggtggcagtggaggtggatcccagccgctgttttccacgacagggtgtggagaggagactgtgcatctctctctcctcaggagactgtttttgctgtcaggggttccaggtggaggggagtagaaagcgcatggacgctccagggttttctgtagcttgaagggacgggtccgggccttgagggctgggaaaccccttgcggagggggaggggcgcgttcctgtgtggccaggagcggatggggaagcgaa[132 bp omitted]gaaaccccgtctctactgaaaaaaaaattagctgggtgtggtggcacacgcctgtagtcccagctacttgagaggctgaggcaggagaatcgcttgaaaccgggaagcagaggttgcaatgagctgaaatcgtgccaccgcactctagcctggtgacagagtgagattccgtctcaaaaaaaaaaaaaaaaaaaaaaattagctgggcgtggtggcacgcgcatgtagtcccagctatgcaggaggctgaggcacgagaatcgtttcagccccgcaggcggaggttgcagtgagccgagattgtgccactgcaccccagcttgggctacagagtgagactgcgtctcaagaaaaaaaaaaaaaaaagacatttcattttggagacgacatggtgagaggctagctctagggatggtttagaaaataaagtcacctggggactggtccacccccttccggtccccttgcctgttggggtcagggctgccctgggaagggcagcgacgctgggttggtaggagcatagactgcagggcacctgcctgagtgtagagtccctgggcctctaattctgtaaaatcgcggtaatagcatccgcttctctgagctgttagaggtgtaacaggtaaacccatgtaaggtgcttaggacagggctggtgctggctaagtgccgttaatatcgtcagcatcattacctgcgttattgtagcactgatcgccatgtcagctgccttcagggtctggcaggtaaagtagaggggccaggtagagatcctgctgacctggcaagcacatgttccctccagtcggggcgttgaccgctcagcagcaggtctagtgtcacccagtctttctagttctcaggagaagttgagggtctggatttttagaggatagctcttgtttcctttacttttttttttgagacagagtctcactgtgtcactcaggctggagtgcagtggcacaatctcggctcactgcacctcctcctcctgggttcaagtgattctcccgccgcagcctcccaagtagctgggattacaggcatgcgccaccacacctggctaatttttgtatttctagtagagacggggtttcactg[139 bp omitted]acgcaattcaaaaattagccgggtgtggttgtgcacatctgtaatcccagctattcaggaggctgaggcaggagaattgcttgaacccaggaggcagaggttgcag[132 bp omitted]tattccttgtagcttacccagagcaatgacaggagaaaggcttgggggacaggtgggacctgggcacatcttgcatgccagcctgagagtgggcagtgggtggagagtcccaccagtgtcctgagcagggagaggatggggttccgcatccccagactggaacttgtgggtctgtgctgagactggtggaggacaaggggtggtccccactattgtcgagaccctggacacaagcaggatgaggtggtgggtgagggtgtagatgaggtcaccgtggaacactgttgtgcctgagctggacacggctcataaagggggagccagccatccctcccagagctcacctcccgggaagttagcaagcgggtgtctagtgagggagaggtgacgtgggccaggcagggctcatgatggcaggactgcccttaggctgagtgtatctagagcgccatctctgtagccggagggaggccggaatgccgctctgggacattttggagggagagtagcaggagaggagagtcgagcctgtcaccctgggccttgcaggaaggaggactgtggatccggacccagggtggggtgcggttggggtccctggagcctcacagtcctcctcccgccctgctgcatccccaggagccgctcccactcaggggaccgctacaggcggggcggccggggcctcaggcaccacagcagtagccgcagccgcagcagctggtccctcagcccgtcccgcagtcgcagcctgactcgcagccgcagccatagccccagccccagccagagccgcagccgcagccgcagccgcagccagagcccctcgccatcacccgcaagagagaagctgaccaggccggccgcgtcccctgctgtgggcgagaagctgaaaaagtgagcggggcgggtctggaggaagagggctgccaatctcgggtggggagggtgaacatcactgttttctttttgaggggaacttagccctaccctgggaggtctggggggtggtgtatggccctggcctgggagggtggatttcagggggacacagccctggcctggggggtctgaggaggacacaccaaatcctggaggatctgcacaattagaaccttgtcctgggtgagggtcagagggggacaggtccctgtcttacaggttctgtggggtctgagagggacatggttgcaccctggggcatctgaggcccatgccttggctacctggtctgagggcagtgctgaggctggggtcagaggtggcagctgccctttccccctcccaaccatgtcctctggccctgcccccacccaggaccgaacctgccgctggtaaagagacaggagctgccaaagtcagtaagaatttggaactcgcccgtctaattcccgtcagcagcagtgcccaagagctgggcccggtgggcctgcaggggggcccgggtgggctgggagatccagccccagggacagggaggggaggggaagggtctgcccctgtgagaaccatgtccctctcccctcctcactgtacactggggctccacctgtcactgaacctctgggagcctcagggctgtccacagcctgcccctcctccccacgtcgttctcccccccccaccccccccccgcacaaagccccaggcttttggctgaggtgggttgtgggagctctgggacacccaccccctctcccgcctcttctcccccctccccagcccaagctgacgcctcaggagaagctgaaactgaggatgcagaaggcgctgaacaggcagtgtatgttctgccctgtccctccagggtttcacagctcttctttcccttggcagtgggagcaaggagactcagcaccactttgggaggcctggcccttccctagagaggccacgcaggcacggaggtgctctggggaggaatgggtttgcatcagctccgctgccgctatgctggggcctctgcagtcaggttgacctgtctgagctc[131 bp omitted]cgtctctctaaaactacaaaaaattagccaggcatgttggtgggcgcctgtagtcccagctactcaggaggctgagg[159 bp omitted]tctctctacagtcaaggcggataagaaggcggcacaagaaaagatgatccagcaggagcatgagcggcaggtgaagtgggaaagggagggctggggtgacgggtgggtgctggcctggccacgtcctcatagccctgtctgctgcaggagcgggaagacgagcttcgagccatggcccgcaagatccgcatgaagtaagaccttgcccctccctgtcccatggccacacctcctggcctgcctggccttcccaccatgggctgctggctcaagccctgcccagctccctgtgggtggatgaaaggcagagatccctgcctggccctcggggctgtgcccagctgcctctcttgctcctctccctgaatttcctcccaccatttcgacctgcctcccgccaccgcgacctcctcccagctcttccagcctccaagtgccagtcacctttgctgtttttttggcctggcaagctgttcctgataccccttccccactcacccaccgccatgggtctttctcctgtcccagcctcagtttgcttatctcctaaatggagatacagtcactgtcccacctcacaggctgttgggaggatttgacaagatcaaggccaggcacggaggaggcacccagtagacgtagccattgggttgccaagcctggccactgtgacggagaccatttcaacactcactgtgtgcaggtgccccagtgcggcaggaaatgatgggactatcctgcctccctctgttccccaggctttcctaggaaggggctgggattccagtcagccccgccagctggggtccctctgaacctggggctccctttccaagcggggattggtggcagtaccggcccccttggtttactgtcttcctcggagtagggtgttggaagcacctgccctccctgagttcagtgtgtccagtgttcccggccagatgctcatgccatgccttcgcagggagcgggaacgccgagagaaggagagagaagagtgggaacgccagtacagccggcagagccgctcaccctccccccgatacagtgagtgtccccaccaggctgcagggctctggggcttt[139 bp omitted]ccaacatggtgacacacatacgtacacacacacacacacagattgctttagtcacaaggtgattgcagcaattagaagtgctcattccggcatgggctggtgaggggcacagatggcagccactggactctctggaaatgtcccctcatttggagacaacccctgaagttcagttttgaggacctcaccccaggtcaaggaagaggccctggccctggatgtttgctcgctcttcacctgttgttttctttccaggtcgagaatacagctcttctcgaaggtaaggaagcccatgaccctccactttcttggaagtaacacttgtcctttgatgggaggtcctggctgtcattcctccagcctcaccctgtacccacctccagttggaggggctggtctcatcccttggggaacatccttccctccacagacaagtgccccgatcactgaagcatccacggccccaggtgtgttgatgtgtgtatgccccatcctcacggcccctccctttctctttccaggcgctcaaggtcccgatcccgaagcccccattaccgacattaggcagaagagtggggggtggggaggacaagggggtgggtaaggggctcaagctgtgatgctgctggttttatctctagtgaaataaagtcaaaagttatttaattcccgtcacctgtctcagtgtcatctgtgtggttggtgcagggctctcccaccccagggcccatgggccagcagagccagctgggagggcgcttgggtttacaggccagatgccagtgctgcctgtgtgggacatcttgcccccatctgatggctaagtggcaggcccctgttcatcagaacctgccatggctcagtgaggcctgctcaggaggccagggcacagtcccaagggagagggcccagacctgcccgcagatgtggacatagggtgtcggcccagcatgtcccacatgggcccctttgcccagggcctctggcgacaggtccgggcctctccccgccctcgcctcagcccctgccctggcctcgcccgcactaggaactgggagcgcagctttctgtgccagtcctgctgcgccccaggcactgggggctggccgttccctcaccccctcactccaaaccggtctgtccagccgtccaccccacggaggggaagcctcctgccccacctcatgcaccccaagaaagccagagtccagacgggtgtaaataaaagggaaaatttacttggagaaggcgggcaaaaacgaggaggtcaatgggtgttggcagcggtaccagggacagtgaggggggctttcctgggctcaggcctcgccggccgcctcagggtgcttctgccgcaggtgtttgtccagggtggctcgcaggccgaagggcacatggcagtgggggcactcgaagcgggtgctgccaggcgtcatgccgtgcatgcggcggtggcggttgagcttactgctctgggcgcaggcgtagttgcagaactcacaggtgtaggggcgctccccggtgtgtgagcgccggtgcaccgtcaggttgctgctgttggtaaaatgcttcccgcagaactcacagctgcccccgggcccgcggctcttgccccctgacttgggcatctttttgggtgatgccttctggctgtttgcagggtcagttctttgttccgtggtgatggctccccaagtgtctccaccagggccggcttgagccccactgccaggagccccgggttcctggacacctgctgtggcggcggctccagccccctcaccaccgctgcatggaagggtgctggtgggggcagcagcatggacagccggctccggaggggctgcagaggcctgctcctggctggtgtcggccatgagggggctctggggcggcacctgccggtgggtcttcttgtggcggttgagcttgctgctctgggcgcaggcgtagggacactggtcgcaagcatagggccgctcgcctgtgtgtgagcgcatgtgcactttgaggttgctgaaggagctgagggtcttcttgcacacaggacaggtggggctccgccgggtgaggccgctgccacttgcacgggggctcttggcctcagctgctggccccaccactgccgacacggctgcagccacctcggccaggcccaggagcggggcctccggggcctctgattctgtctggtagatggacagtccgtggtcccactgggcgtgacgcagcagcttccaggccactgtgaactgtttgccacagcgcaggcagctcaaggccttcagctcctctcgttctggtaagaaaaagaggcagagtgttagtgcggacagctgccagctggacaccttctgtgggataggcactcctgcaggggcaaaggacttggcagtaacaagacacacacaccctggaaggaccaggaagctgacgctcagaggaggggtggacacgaaaaatctgtggagtgggtgctaagtacctgaaaacatttttttttagacagtctcactgtcgcccaggctggggtgcagtggcacgatctcagctcactgcaacctccacctcctggattcaagctattctcatgcctcagcctctagagtagctgggattacaggcgcccgccaccatgcctggctaattagtagagatgggggtttcaccgtgttggccaggctggtctcgaactcttggcctcaagtgatccacccacctcggcctcccaaagtgctgggattataggcatgagccactgtgctgggccatgtgtttgaaaatcttttaaaaagttatgttaactcagtaagcgcttcctacatgctaggtgctgagccatggctcatagcccggctttccctcaggacaggaaaataagatctccattttccagacaggagaactgaggcacagagaggcatttccccagggttgcacagcttggaaggggtgaagctgggatttcaatccagactactgggggagggggagagggcagaacagaggcttgcttgcttttttttttttgctttaaatttttaatttagtattttttaaagagatggggtcctgctatgttgcccaggctatttttttttttttttgagacggagccttgctctgtcgcccaggctgcagtgcagtggcgcgatctcggctcactgcaagctctgcctccggggttcacgccattctcctgcctcagccaccacgccacagggtttcaccgtgttagccaggatggtcgcgatctcctgacctcatgatctgcccgcctcagcctcccaaagtgctgggattacaggtttgagccaccgcacccggccgcccaggctattctttaacttaatggcctcaagtaatccttccgcctcagcccctcaaagtgctgggattataggcgtgagccaccatacctggctgggagcagaggcttttgaataagatttttggtttaggccgggcacggtggctcacacctgtcatcccagcactttgggaggctgaggcgggttgatctcttgaggtcagggatttgagaccagcctggccaacatgatgaaaccctgtctctagtaaaaataaaaaatagccgggtgtggtggtgcgcgcctgtaatcccggccacttgggaggttaaggcaggagaatcgcttgaacccaggaggcggaggttgcagtgagccgagatcccaccactgcactccagcctgggtgacaaaagcgagactctgtttcaaaaaaaaaaattttttttggtttaataaaaataatttttaaagtaattgagatatctgggcatggtggctcatgcctgtaatcccagcacttcaggaggccaaggcaggtggaccacctgaggtcaggagtttgagacaccagcctggtcaacatggtgaaaccctgtctctaccaaaaatacaaaaattagctggccatggtggtgcacgcctgtagtcccagctacttggagggctgaggcaggagaatcacttgaacctgggaggcggaggttgcagtgagctgagattgcaccacagcactccagcctgggtgacagagtaagactccacctcaaaataatggggtagctacagagaaagcttagcggccacctagtaaagaggtggtagtgacctgggtcccccaccctctgcatggatctcaaattgagcccccaaacctgaatttggatttctatctggaccttcggggtactctcagtggacacttcctaggtgaactagcctttccatttttcaaattctagagtcttggatgggacaacctttgtgatacaaccagtcctgggtcaagagcacaggcctgcattcaaattcagacttctctgctccctaattgtgtgaccttgggcaagacatagtcctctgtgtgcctcagttgctagaattcagggaccctagagatcccctccctttcaagggtggttgtgacctcgcttggggaatggttgagagctttggtccacataagcgctcaaacagcagagcctgtgaaaccaaggtgcccatgattctccaagccctgtagtgttttgttccagcgattccatcacagcccctcgctcgctcctccaggccactctccatgctccagctctaaagctgattcaatcagtcacaagcccctcctctttcccaccaccagaccctccctggcccaaccctaaataattccacttctcaaaagtctcagaagggcaagggccagggggctggaaactaggtttggattaagccctgcagccaacactgaccaaaagctcaccgagggtcaagccccatgtgaaggcttttaattccctcccaagagaaggaacccgggtgtccagcacccgggagctcgctcaaaccaggggattcccagcacgcggggctgggagattccatcaccgagggaagccagaagccccttccttggctctgaacactcagctgtactagcacctcaatcagaattgacagagagagacaggagggggtggcaacctccccattccagctggcctccactccccctccccccggccgctgccctccctagaggtcccctcctactgccaccctggtccagccacctggccagttatttctggccaaggggaaggagaagtgaaaccaggttggggtgtgtgttggggggggcaaaatcccgggctagtcttctggggctggccacaccctgtaggcggccctccttccctgcccagtccccccccgccccccctccaccgccaccactggtccctgccctaggacgggcaggccctggccacgcctaggctgcacccgatggggagcgagaaaggggaagtagtgctcagtgccctgccgtccagcccagcccctttccagcaggaagcccagccctcgaacttgagagggggactgcacccggctttactcacctgagccctggccgcggctggggcctctgaagagctgacagcccagcttcttgtggtccatgaaggcagtgatggcctccaacgggaaggtctgcaggcagcggccgcaggtcaacagatctgggtgtttgtcggtccagggctggcggtctgcagggaggaagcgggtggtgagcgtggggtggggccaggatgggggctgagggtgctgaaggagaggggaaaccgaaggtcagaagggggcctgaggggcaggacggggcgaaggagataaggcagggcgaggggcccatgcccaaagggaagggtcccacccgagggtcaaaggtaagggaggctgggcccagggcccggggtgctcaccgggatagttcggggtcaacggcgtccacagggtccacgggttccgcgggccgagggcgaggagggcggccccggcgggcatggggccaggggagtggtggggttcgccgccgaaccgccccgccgaggacacctccttcggggagaagggccccagccttggggcctgttggggctgcgcgtctggctcgggcttgagttcgatgacgaggtcctgcatttccatctcgtcgtctgggttggcggcgggcgcgggctctactcggcggggcgcgctgccggccttgcggcgggacatgagtcgcgggccgggcgagcgagcgggcgggcaggcaggcaggcgggcgggcggaggacgcacgagcggaggacgcgcggaccgtgcgcgctcaggtgagtgactgcggcgacccgccgcgaactcttacacgtgctggccgggcccgtggctccgcctaccagggcggggctcatgggaggggaccgagccgccctgctggggccctgacggcggcctaactcaatctaggcagtgtcccgtgcgtttggcttagtgaccaaatttaatcacaccgagttcccacaaggcattgaaacagctatccctgatcccgttttagggcgggtgaaactgagacacggcatgcccacacgcacccccaagcgagaaaaatagtcggtcacgtttcttattaggtgcctgatagtaatctgggctatttcattaaatgcattacaataaaaattcattttgcaagcattcactgagtgcctcctgtgcgccaggctctgtttgaagccctgagaatacaggagggaataaacagaagataatctttgtttgcacggagttcagacggtgggggaagacactataaacataattacgtaaaatatagatggcccttcatgatgaccagtgccatggagcaaaagaaagctggaaaggcggagagggttactggggttgagggattcaattttctcccctatgatgggaaagggcatggtggagctgaggctggagggaaggaagcccagccagtgggcctgggcattgaggaattacaaggaaagggagaggcaatacgggttggggattgagttcagtgaaaatatgggggcagatccaagcaatcttttgatcgctttaaggtcttttggttttcctgagaccggagccttaggagggttttgagcagaggaggactgtaatcatacacatcgactctgttcctagaccagaagtcgccattaaaaccaaatagccaagcagctcacctgcctccactccgcctccttgaacttccctcccctaagcagttctgtctgctcactgtttgaagtggcatcgacaccctgccccaccctcaatccctgatgagtattcttttcttcctggcaccgactgcacgacagtatagaacggcttgtggactgtcctctcccccacccaatgcaagccccctgaggtcagggcaagaacctgtcctcccccagctgtcctcagcccagatgctgatttcagatgctgatctcttggagttctgcacattgttattcaggtctgggttccattgtcctcctgagagcagagggccctgaccaacagtatctaaagtagccccaccctgctgaaggccttgcaaattacactccatgacctccatctgtccccagttccctcttggatctcactttctccatctgtcaaaggaggtagggcaggttggaactagagggttatctgaggtggtttcttcttcactgccgcctcctctgatcaccctttttttttttgtaatttttaatttttcaaaaaaaattatttttaaatagagacagggactcgctttgttgccctggttggtctgaaactcttggcttgaagcgctcctcctgcttcagcatcccaaagtgctgagattacaggtgtgagacactgcactcagcctcagaccacccaattttaagttccatggcaacccagccacccactatcccattgcccttattttactctttttttttttttttttttttgagatggagtttcactcttgttgcccaggctggagtgcagtggcacgacctcagctcactgcaacctccgcctcccgggttcaagtgattctcctgcctgagcctccggagtagctgggattacagatgcccggctaatttttctatttttagtagagacagggtttcaccatgttggccaggctggtctcgaactcctgacctcaggtgatccacccgcctcagcctcccaaagtgctggaattacaggcgtgagccaccgtgcccggcctattttattctttatacatcactttgatcaaaccctgaaggatcttgtttacatatttgctcattttaccctattctgtcccttctacccccactagaacgtaggttctaggaggcaggatgggagtctgtcttgttcataaatacaacccctactcgttcatagttaagtcaacaaatatttattgcgcacctactatgtgtctgatgatattctttcaacagatatttgcagagcaccaaattgtgtacctggcactaggccttggtgatctagtggaaagcaaaggcccacaggatccctgcgtaaagaggaccccgcaaggagaaagtgaattctgactgggcctggaatagggaggttcatattccccattcaaggcctcagtttccccctttgtaaaatgggactgcagggagagctggaggacaaaatgaccgcctctgatccagcccagctactttcttagtatgcggcatctgaaaccatgatctccaggtttcctgtagaggagcgggggttcccactggaagcaaggggttaggagtgggtatgtgtagggggatggggatgcaaagaccgagctctgcccttaacccagcagggaggaagtcttcccctctctgaacctcagtttcttcctgcctaaaatgggcatcccagacgcccccaactcgcaggcaggaagatcggtcccaagtgccccgcaaagccgcgggccaggtggcgacccgggctgtgctggcttccaagcctgcgagccagcccgcgaccacgtggggcagtggcggcggcgcgggcggaacccaggctccgcggcttgcggcctgcccgggcctctgcagcgggggcgccggcggaagtggggacaccagtagccgcggacctcggtgagtacaaggtggtggggggtcgccagcaggttccctctccccggccccagctctggacgctcaccccagtgcaacgccctgagtgacggaaagaggtaggaccgcgcctgcagcgccggctggagggacgttctggtccccagacgctcctatcagggactgtttgatcccgatcgccggcagcgggaatgccccacgcgggtggggtgaggagaagggagaaggagaaaaacttcccctccggaaaataataaatggccacgataacagaagcatcggtggcagtcatcccgctttacctggagcggaatcgctcgctcagtctgagcctggaggtgggaagaaggtccagtccgaacgcccagggcggtgtggggagtggacgcctgggggccgggaggacctacttagtataagaaaaggagagcaatgggtggtcagggcggaattgaaaggaaactgaccggccccaggggagaaggggaggggagagattctgtgcttggggttctgaccctctcgggtggccccatttagctaatttgcatcaagattcagcagccgatgatgtctgtatgtgtgtgtgtgtctgtggacacgtcaacaccttggttaattaattaggtctggcggcttctctgttgacaactcagctggttccacaccctggcaattgtgaagagttggccaaatgtttgtccactgagctgatctcctctctggagcaccggggccaccaggagggaggtctgtgaaacccctgcccctgccattgacctaagtgttgggctcttgaatctaacagactagtttttcaagtcgtgggggatgggcttgggcatttttccctgaaaccttcggaaatccttgccttggagactgaaaggataaaggcctctggggccaggtcaccagggacaatggataacgcctgcctctaccctcctgggcacaccctgtgtgatctttcttaaaccagtttcttatcaggtcacaccttggctccacagtctgcctttctacatggggcacgggtgaggaccagagtttgctccctcttcctccaccctccagcttgcaccaaggaaatgatttttttttttttttttttgaaacagagtctcactctgtggcccaggctggggtgcagaggcgtgatctccgctcactgcaacctccgtctccctggttcaagggattctcctgcctcagcctcctgcgtagctgggattacagatgcgtgccaccacatccagctaattttttttgtatttttagtagagatagggtttcaccatgttagccaggctggtcttaaactcctgacatcaggtgatctgcctccctcagtctcccaaagtgctgggattacaggtgtgaaccactgcacccagcccgaggaaagatttgacctgccagcttcactggccactttacaaaaatggggattgcatcaatatgaccaaatctcccttgttttttgtttttttttttttttttcctgatggagaaaacaaggccctatactggccctcccttaatttcattttatccagggatttaacagaattctttggccactctaatcctatctaagtcatttagtaagtactcaccctagagactagggggtttctcttgaaactcaagtgttaatctaggctcaggaaagaccctgggggctggtgaggcctgactaaattggagtgacagtggtcagagaaaataaaaaatgcaagtagggcgtgttggcgtgggcctgtaatcccagcttctcggaaggctgaggtgggaggatatcttgagtccaggagttcaagattagcgtgggcaatacagcgagacctcacctcaaagtaaataaataagtaaatgtgctttttaaaaaattagaaaatgcaaggccgggcacggtggctcatgcctgtaatcccagcactttgggaggctgaagcaggcagatcaggagtttgagaccagcctggccaacgtggccaaaccgcgtctctactaaaaatacaaaattagccatgtgcagtggtgcgcgcctgtagtcctagttacttgggaggctgaggcaggagaattgcttgaacccgggaggcggaggttgcagtgagttgagatcatgccactgtactccagcctgggcgacaagagtgagactccgtcttaaaaaaaaaaaaaaaattagaaaatgcaactatcccttaattccattcacgtggtcttccctgtcaggaaaaaaaaaaaaaaccttggagtctcccttggctgctctttccctcaaattatatatcccttatcctgtccatcaccgagggctcttgacctttctttttttgtttgtttttgttgttttgagatggagtctcactctgtcatccatgctggaatgcaatggcacgatctccgctcacttcaacctccgcttcccgggttcaagcgattcttctgcctcagcctcccgagtagctgggattacaggcacgcaccaccacacccagctaacttttgtatttttagtagagagaggtttcaccatgttgaccaggctggtctcatcctgacctcaggcgatctacccacctcagccttcaaaagtgctgggattacaggcgtgacctactgcgcccagcctcgacctttcaaacatagcctaatctgaccacttctccccattcccattgtccccagcccatactagacgccatcttcttccacctggaccactacagtgacctcctcattgcgttcctagtgtctcccttcaatctcgtttattgtccatgcagcaggcagaggatcctgaggaccttaagccagattctgcccatccttcactcagaactgtccagtggcttcagtctcagagtagagacccaaattgtcatcacagcccacaaggcactctctctgtccctgcccccacctcctccacactggccttgctacgccccaaagccaccctttccatgatctttgcattttgctcttccttctgactggaatctccacatggctccattcctaatttcattcaggtctatgctcaaacgtaatcttatcatagggatctttcctgggctcccttgaaactaccctctatcccccaggctgggtcaggtgtctcctctggactccttcattccagccctactcactttgggtcatcactgcctaaggacaggtctgtgtcccctattggactgtgagcccacaaaggcggaactgggctctcagtcctagacgtgtttccaagaccgcccaatgtgggtcatgcacagagcaggcactcagatgatgtgctaacaatgctagataatgtggatgagtgaatttttttttttttgagacagggtctcatactctgtcacccaggctggagtacagtggcacagttatggctcactgcagcctccacctaccaggctcaagcgatcccctcacctcggtctccttagtagctgggactctagtcgcacactacccatgcccagctaatttttttttttttttgtagagatggggttttgctatattgctcaggctggtcttgaactcctacgctaaagcaattctccagcctcagtctcccaaggtgctgggattatagttgtgagccaccgcacctggctagaaaacttttctttggtgcataaaaatgatataaaattcaaatttcagtgtcccagtaagtaaggttttgttggagaacagccatgttcatttgtttccatattgtctatggctgctgttgtgctactgtggcagagttgagcagtgacagtaaaatacttacagagaaggttcgcagacctctgctacgtattttgccaagaagaaaaataaaataaagttaaaattgaaaatatgttgcccgctgggcgcggtagctcacgcctgtaatcccggcactttgggaagctgaactgggggtgggtcacctgagaccaggagatgtagaccagcctggccaacatggtgaaaccctgtctctactaaaatacaaaaattagccaggcatggtggcgcgcacctgtaatcccagctactcaggaggctgaggcaggagaattgcttgaacccaggaggcagaggttgcaatgagccaagattgcaccactgcactccagcctgggggatagagtgagactccatccccaaaacaattttgccaaggaggattctatttgggccacctatgggcatgtgagatcagtaagatttggcagctaattatgcagagtgggtgatgaggtttagatgcctcccagggagagctctttttcacattttcttttccaattcttcttctttttttttttttttttgtttgagacagggtctcactcttcccaggctggagtgcagtggtgcaatcacatctcactgcagcctcagcctcctccggctcactagatcttcccacctcagcctcctgagtagctgggactacaggagcgcaccctttgcccagctaatttttctatttttctggagacgagattttgctatgttgcccaagctggtctcaaattcctgggctcaagtgatccacctgcctcagcctcccaaagttctggaattacaggtgtgagccacctcgtgcccagctgcttcttgctttctgaaattaaaatttaggccgggcacggtggctcacgcctgtaatactagcactttgggaggccaaggcgggtggatcacctgaggtaaggagttcaagaccagcctggccaacatggggaaaccccgtctctactgaaaataaaaatatcagctgggcgtggtcgcgggcacctgtaatcccagctacttgggaggctgagtgacgagaatcgcttgaacccgggaggcggacgttgtagtgagccaagatcgcgccactgcactcctgcctgggcgacaagagcgagactccatctcacaaaaaaaaaaaaaaaaaaaagaaattaaaatttagtggctgggcatggtggcttagacctgtaatcccagcactttgggaggctgaggcaagaggatcacttgagcccaggttggagaccagcctgggcaatatagtgcgacttcatctctataaaataaaataaaattaattaattaaaaattttatttatttatttatttattttgagacagagtctcgctgtgttgtccaggctggagtgcagtggcatgacctcagctcactgcagcctctggctcacgggttcaagcgattcttatgcctcagcctcctgagtagttgggattacaggtgtgtgccaccatgcctggctaatttttggggcgtttgtttgtttttgagatggagtcccagtctgtcacccagactggagtgcagtggcacaatatctcagctcactgcaacctctgcctcccgggttcaagagagtctcctgcctcagcctcctgagtaggcgggattacaggagcctgccaccatgcccagcccagctaattttatttatttatttattttttgagacagagtttcactcttgttgcctaggctggagcgcaatggcgcagtctcggctcaccacaacctctgcctcctgagttcaagtgattctcctgcttcagccttccaagtagctgggattacaggcatgcaccaccactaattacagaaatgcaccatcaggctaattttgtatttttagtagaggcagggtctctccatgttggtcaggctggtctcgaactcctgacctcaggtgatccgcccacctcggcctctcaaagtgctggaattacaggcgtgagccacagtgcccggccaacacccggctaatttttgtatttcttagtacagacagggtttcaccgtgttgaccaggttggtctcaaactcctgacctcaggtgatccgcctgcctcggcctcccaaagttctgggtttacaggcgggagccactgtgcccagcctatgttcatgtcttctatagccatctttattccttcctccctctttgtgacctgtttgtctgcatcagtgtttcatttggggccatcaggagacgtttggcaattcatggagactttaaaaaaaaactgtattgagatgcaattcacattcaccaattcactgttcaccagtggtgacatttttggctgtcacaacttgaagatgggatgctactggcatctattaataggaggcagaggctaggatgctgctcaaaccctacacctatgcgttggacagcccccacaacatagcagataattatccagccccaaatgtcaatagtgtccagactgagtagccctggttcacatccttggtctatctgcagggtcctgtcttgcaaggggctcacagttcaggtgcagagacaggaagagcctaataagaaaaaggacaagttagtccaggcacagtggctcacgcctgtaatcccaccactttgggaggctga[266 bp omitted]gcctcagcctcccgagtagctgggactacaggcgactgccac[138 bp omitted]cccggccacacaagaatctcttgaacctgggaggcggaggttgcagtgagccgaggtggcaccactgcactccggcctgggtgacagagtgagactctgtctccaaaaaaggaaaaaaaagaaacaggacaatttcaatcacctcccttctgtgcctggccccagggtcttgggtacccaacacttgtcactcagctcagttagtcctcactaggtttagagaggagaggaccaagccacagggagtggtgcagctgctaaaacctaggtcctcctctctcaggtctgcacccacaaggccagcatttccctatacacattcaacatcatagcatagcgcttcatatgtcccagacatgtgccaaacatggtaggttagttaggtaatttagtccccatgcccgccctgtgagttagggctctgttttacagatggggaaacagaggcacagattagtcaagccatttaccccaggtcacacagcaatactaacaataagagcagttcactattatggagaacctagaatgtgccaggccctgtctggcaggagcctgttgaatcctgataacagcataggcagcaattggggctatttttccatacaatggaagagaaaactgtctcttactgatgtcacacagctaaaccggcctgggatctccac[131 bp omitted]gcctcagcctcatgagtagctgggattacaggcacgtgccaccatgcccagctaatttttgtattcttagtagagacggggtttcacc[140 bp omitted]aggctggagtacagtggcacaatctctgctcactgcaacctctgcctcccaggttcaagtgattctcatgcctcaggctccccaagtagctgggattacaggcacgcaccaccacgtccggctgatttttgtattttagtacagacggggttttactatgttggccaggctgctctcgaactcctgacctctagtgatcctccagcctcagcccctaaagtgctaggattataggcatgcgccgccatgcccagctcattcatgaattctcattggtctctatggcaggcagtttctgggggctggagatccagcagtgggaaaagcaaggtggccaccttgaaactcacggagggaaaggagatacaggcagatacagggaaccgaaagtgcaagagcccaagaagggattgccaggcatcgcgcctgaggatcagcgaggaggcctgtgtggctggggtggggagagcaagcgtggtacaccacgagggtgccggcaggatccagagctaagacagaagccacaagagggctccgagcagaggagggatatgatctgactcaggcattaacagggtgttggggtgcagacggcggggggtgaaggtggaagccagggacccagtgaggagttgactacagtactccaggcaggaagtgtctgtggctgcagcaggatgctggcagtggaggaggtgagaagtgt[133 bp omitted]acctctgcttcccaagttcaagtgactctcctgcctcggcctcctgagtagctgggattacaggtgcccgccacgatgcttggctaatttttgtatttttcgtagagacggggtttca[131 bp omitted]gtcttttatgactttaatatttttgaagagcccaggttagttgtgctgtttttgtttttgttttttctaagacaaagtctcactcttgcccaggcgtggagtgcagtggcgcgatcatagctcactgcagcttcaaccttccagggctccagtgattctcttacctcagtcttctgagtagctgggacttccacgagtacattgtcaagcctggctaatgttttttatttttagtagagacgaggtcttaccatgttgcccaggctgctcttgaactcctgaacgcaagcaatcctctcaccttggcctcctgaggtgctgggattataggcatgagccaccatgcctatccctgttgtccttgtttggcccagaggctggaagatcacttgaggccagaagttcaagaccagcctcggcaacatagtgagaccctgtctctttaaaatttaaaaaaaaaagaaaaggaatagcacagaagtggtgccctgccttcttagtgtcccattcctggagatgttggctttgatcactaagttaagggggtgcataccaggttcctccagtataaatttgtgtttgccctttacagtgaatgaatatcttataagtctgttaagactatgtagataccttatacttcatcaaactcccatccatgcttttttttttttttcttttttttgacacagagtctcactctgtcgcccaggctagagtgctgtggtgcgatctctgctcactgcagcctccgccttttgggttcaaatgattctcctgccttaacctcccgagtagctgggactacaggcgcatgacaccacacccggctaatttttgtatttttggtagaggcggggtttcgccatgttgaccaggctggtctcgaattcctgacctcaagtgattcgcccaccttggcctcccaaagtgttgggattacaggtgtgagccaccgcacccggccctatccacacatttttgcatctattccttttatatttatttacttgccagtctacagtaaggattatattttccttctcttccttatttattcatttatttattattggtatggattctggatttctgttttatccagtgggttataatctgtaactatcattattgtattgttcaaataattccagatttggccactgggagccctttcaagctagctcatgtgtgagtgggaatctatctagaagatagaatttcctgatggattgggtgggttgtgtgtgagagaaagctggggtttattcttttttttagagacagtgtctcactctgtcacccaagctggagtgcagttgcacaattacagctcactgcagcctccatctcctgggctcaactaatccttctccctcagcctcctgagtagcccagctaatgtaaaatatatatatatatttttagaaatggggtctcgctatattgcccaggctggtctcaaactcccagcttcaaagtgatcctcctgccttggcctcccaaagggctgggattacaggcatgagccaccatgcctggccaggttcatcttttggcaaatatttattgcctataagttgagataaaaacattataaaagcagacaaaggtccttgccttcacggggctcatgtttttgtgcatgtgacacttttgtttctgatccaagccattgggggacgatggcacagattttaggagggtggatcagtctggggcaggtgcagtggagctgcctggtagaccagcctctgcttccactcctccctcctccattagccccatgcttaccatgtaatgacttcctgctctttttcttcactcaacagccaagacaatgcaaactccagtgaacattcccgtgcctgtgctccggctgccccggggccctgatggcttcagccgtggctttgcccctgatggacgcagagcccccttgaggccagaggttcctgaaatccaggagtgtcccatagctcaagaatccctggaatcccaggagcagcgggcacgagccgcccttcgggagcgttacctccgcagcctgctggccatggtgggtcatcaggtgagcttcacgttgcacgagggtgtgcgtgtggccgcccactttggagccaccgacctggatgtggccaacttctacgtgtcacagctgcagactcccataggtgtgcaagcagaggcgctgctccgatgtagtgacattatttcatataccttcaagccataaagatattgtgttcacttttctgcttgaggctaaggcactgtatcccaggcctcccaatgttcccgagccaggaactctgggccccatggagttatgagctcccttggaattttgagccaagctttaagcaagtctggactcctgagacctcctgggtctagtcagtaaaattctgcaactctaggaattctaagatcccattggaaggaatgctctacctcacagaactctgaaccctacagaaatatgggcctgctgccatttcctgaagaccggggcatcggggtggggtgataaaggatacaacctgcacagggggaagttattaaagaggctgcaaagtccagccaccctgaagatactccccagtgctcccctcctgctaaagaaccagttaccccaggaaaattcgactcctgtttttctttaattaactataccgacggggatggagtcatctttaggggctggtagggtggttatccaagggctgaatccagtggagctgggccaagtacgacaggagtccagataaaggtgtaggggctgcacggccgcaagtctcctggaaaggctggagtgaccggcatgccgggattgggagattaggatttgatttcattttggggcgggcggtggctcgtgctgggtcacgtggtcgtgcccaagcgctcctcctgttgccccacctgtggttgctgtggactgcacacgacagcagattcgctgtcccctcgttggaggcgaatggtcggaccccgagtggcggcgcccctgataaaaggccgaggattcgcgatcagggtgcaacttcactccctcctcttttctctccagccttgcagcgtggccgttcacatcacgcgcttcactaagcctcctatcactagtaacctttcagcgcattgtttaaaaagaaagcagtttctgtccctttctgtagttcctttaagttcaggatgtaagcgaagccttccattaagtaaaggtgagtgtcgtttcgtctcagtcgcgaaagtgcggcggccgatgatgaaccgcgccaggagcagcctcagcggccatcagtccattcgcagcgccggctccgccgaggcccggacttagctctcgagttgccttggcgacgacgcagctcgctccgccccagttcccttttatggtttcagccccgcctcctctagttagccgggtgcgcttcggcaagcgtggcgaaagtgcggcggcgaatgtcaagcgttgggtctgagcctaggggtgtggcttgagctcacgctggttctttcttgcctcggtgatccaccagccttgtcacccaggatttaggttggcagattcgtctctcgcctttggaatttctaccttctcctaggttttgttttttaaaatcaggcctatgataccgctcatgggctcatatttattttagcattgtaatttaagttgtattttatgcaactctaccccgatacagagagctgttgatgtaactgcagcgagcaaatggaggactagagactagcgaaggggccgagacttcgtctccagagtatccctgtcagcatccatcaactgcactcatatattgaatgcagctcctatccgcctttcttttcgacttcttcatgccgttaccactcttcatcagttagtctagcctcaatgttttcatttatttcctttgttttttttgggggggggggaacggagtcttgctctgtcgcccaggctggagtgcagtggcacgatctcggctcactaaaagctccgcctcccgggttcacaccattctcgtgcctc[224 bp omitted]caggtcggagtgcaggggcgcgatcatagctcagtgcagcctcaacctaccgggctcaagcgatcttcccacctcccaagtagctggaactacaggctcctgtaaccagaccctgctaatttttaaattttttgtaaagacggggccttgctatgttgcccaggctggtctcgaactcctggactcaagcgatcttcccgcctcagccttccaaagtgctgggattataggcgtgtgccgccgcgccccgccaggtgttttcagttctatgcactccattccctgggctcttgacgaatgtgcgggagctgaatattcgttatttggactccggcaggaaggcgtgggctcagcttcgcgcttgcgcgctgctcttggagacggcgtctacttcgccccgcccctcatagtctgcagttccggctctgcagattcgctgctcacgtttcttttttccgtggcccttcctgccctttgtttctctcttcatgtcacccgcgggacaactctacgtgcaagtcgctgaaatcgattttctgcttcttatagtaagcggcgggctcgccagcctcgagcgaaagtgtgactgcgaacgggcaggcgcgcgcggggctcggcggaggcgcgcttgggctcccggcggcgacgactacgaccactaggagagcggacggaggcggcgcctgaagcggcggcggagcccatgccccgggacggcgggcggacccggagagacaaatccggggcccggggcatgtccccggggcccccgtgaggaggcggcggcggctatggagatcgcgccgcaggaggcgccgcccgtgccgggcgcggacggcgacattgaagaggccccagctgaggccgggtctcccagccccgcgtcgccccccgccgatgggcgcctcaaggctgcagccaagcgcgtcacattcccgtccgacgaggatatcgtgtctggagcagtggagcccaaagacccctggagacatggtagctaccgcgggtgaagcgggggcgggctcgagagggacccgggagtcgggagggatcggtgcagggcccggctcgaggtggcgttcaatagattgcacctaatggtgaataaggggacagtcgtcagtttagaaccgtagtctgttagaaagggggtggctatggagttgggaaggtgaaaagtatctggtttctgccgcaccccacccacccgagacaaagatggtgatcgttttagggtttaaaacgatgagcaattaaagaaagtttggtgttttgtcagatgtagagtgtggcagcctttgcgttcgtagttccaccagagaaggagagaaggagcagttgagaggaggagcgggtcaacactgggcctgaaagggcagttgaaagagtttgatgggtctatgggggtaaaaagaggttaagttgctggtctgcaagccttggggcaaggagtggtcgtgttggccactttcttggctggaaagagggagactataaacttggactgtggctatagaggacttggtaaaaaggagtcaagataaggtcccagaagaggagcagaggtggtggtcaatttgtggttgggtgagggagaaagaggcagtgtggtttttatgttttcttttttattgagacaaggtctcactacattgcccaggctggtctcggacttctgggttcaagctgtcctccctccttggcctcccagagtgttgggattacaggtgtgagccaccgccgcctgctgcaatgtggtattaagaagaaaagccaacgcctaccgccgcctcctcctccaaaaaaaagagaagcagaaggaaggctgtcagtcattcaggagcagaggatgtttgggacatggctacggaagggtcctcttgttccttcctgagaaagaattgggggatggccgggtgcattggctcaggcgtgtaatcccagcactttgggaggccaaggtgggtggatcacctgaggtcaggagtttaaaaccagcctggccaacatggggaaaccccgtctctactaaaaatacagaaattggccgggcatagtggtgcacacctgtaatcccatctactcaagaggctgaggcagggagaatcgtttgaacccgggaggtggaggttgcagtgagctaagatcacgacattgtactccagcctgggtgacaagagcaaaactccggctcaaagaaaaaaaaaaaaagaattgggggatgttatcaagtcagaaattggagttgctggccagtagcaggtgagagagatgaaaaagttggctacttgaagtgttgggagagagggccagcgcactggagagggtcaggtcagtgttggagctgaaaggagtgtgttggagccatagggctgggaaagtggaaagtcgcttgggacatgcagggcagtgttgagtccattttgtgctggagaagtctgtcagttctcctggggtggagcccatgaagtgagggatcagactggctgtggtggccgtggttctgtagaagctgatctgccggccctgggcaaggggagaaactattgccagtctgtggacaatggaggaattggtggctttgatgtgagggtgggaaacatggtaactggaaactgaacacacagggagtccatcatgaatgacagtttggctacttattataattttttagacggagtctccctctgtcgcccaggccaattctcctgcctcagcctcctcagtatctgggattacaggcacctgtcatcacacctggctaaaaatgtttgtatttttagtagagttgggggtttcaccatgttggccaggctggtctcgaactcccgacctcaggtgatctgcccacttaagccttccaaagtgctgggattaccggcatgagccaccgtgcccggctggctagttattcttaaagaggcagtggttaaattaagacttttgggccggacgccatggttcatgcctgcaaccccagcactttgtcaggccaaggtgggcagatcacctgagcccaggagttcaagaccagcttgggcaacaaggtgaaaccgcgtctctgcaaaatatacgaaaattagccaggtgtggtggtgcacgcctgtagtcccagcaactcaggaggctgaagtgggaggatcatttgagcccaggaggtcgatagtgcagtgaactgtgattgcgccactgaactccagcttgggtgacagagacccggtcttaaaaaaaaaaaaaaaaaaaagagttttggcactaggagccagccaagtccttgggctctaggccccagggataggtggttagtttgggacccgggcacagtcagaatgccccctggctattgcgtgatatccagtccagagcaggaaggggaaagacctggagaggcagagcagggtgtttcaagagcagaggctccaggtcagatcctttgagacctcgggctggttacctaactcctgagcctcagtcttcccatctgtgaagtaggtggcaatactcttgccacggaatttaggagaggactggatgaagtcacatatggaaaggaattggccagggtgagtgttctcgatggcagtcattgttattaagacagtgttggtcatcttgggctggtgtggaggagttcatgcatggggtggggcctggatgtggctgcttcagaggcttccaggagaggggagagatggcagtcaatgcgtgggcctggagtgaggtgcgagggggaagatggtcagtttgtgggctgaagggtcaggggtgagggcagcaagagagtctggcacagattgggctttggggggtaaagtttctggtctgcagattcccagaacaggtttggctttcattcagtaagccacttttcctctccaagcctctgtttctttctctgcaaatggaggtgctaatttttaccatggggtagttgtgaagatgaagtaagatagtcctcataaatttctgccacataaatagcagctgtcatccaggcagatttgttttttgtttgtttgtttgttttcacgtgcagtcttgaagaggcagtgaaagaactggagaggcagaaggctatctgtcaagaaaagaggggcagttggagcctggctgggaggagtttagaggaggggtgccggttggtctgtcctgggtaaggggtagagtgggtaacactctccaggctgggggagtctctcattccagcggttgagagaggggcagtaaggtctggttgggactcacactctcgaggagtccgtgcgtctgagctgcagaggtgatgacatggactggactggaagaattggtccatcctgtttgggaagagggcttgaggagttggcttggcagtgaggagttggatgatcttgggcctgggcaggggaggggtcattggtgaagttggtgagtttggacaaagggatttgcaggacagaaaacccaagggcctgggaacagcaaggagcaggggttaggctccatgctggggaggacgatggagtggttcactggccatggggctgtgggaggtggagggttcgccagggtgaagaggaatcgtggtacagaaagtgggtctaaggggaggcccaagtgagaggcccagagggtctggggctggaggactgcagggaggggttgcttggtcttggaacagaggtaggagatttgttggcatcaatctcataagctgtggggagggacagggggtgtcatttgagctgtggatctagtggaagggtggcgtgaccccaaggccaaggggtaacagaagagctgacaggtctgaaggggggagactcagttatccggaagctgttgtgccgtgctagagatggagcgctgcctaggccaggggatggaggagcgcccctgggtgaggaggaagcagcactgggggcaccccagtgcaggggtctccttcagcagagcctcacccctggggctacagtggtggcccagctgggtgggagctgtggggggtgtctacctgagggtgagcgctccctcaggccctgcaggggcccagggtttggggattcctggagatgaggtgatctggaggagggggattgtgagggagggtctcgagcctgcccaggcttatccggattcccatctcccacagtggggttccgcctgctggggctgctgtttcctcattacgtgaatggccatctgatgttcttctgttgtgtgcttgttttcttggtggtggtctctctcccgcgctggaatgggagagcagaggccgaagtccatcctcttctccgctttcctcaaggacactcagttgttgaatgagcgcctgtgggcccgtgaggcctggtggtgtctgagagccacctagcagagtgacatgtagctgaatgtcaggggcctgagcagcctggcgtggggatgccagtggggcagcagtgtgctctgtggcctctggcaagcatgggttcttgcagagcattgtgtttcctcacctgtgaaacagggccagtgatccctgccctgcagaccaccaggatgtcagaggatagggtgaacctgctgggggcaggtctcctcagcaagccacagccaggtgtgtgtagatgggcagggaagctcggggaggaggcaggctgggaatcgtgagtgaaagaggccgcttcagcactgccaggctgggcacgtgggtgcccgtggggagcgagctagccggctgcactgcaccccatcatgttgtggcagacccttcagctcttctgaaggccaaggccagacttacacaaggaacccatcaggccaaactgcaggaatgacctgaggctcggctggtctcctcagtcccagctgaactctgtggggttggaaagataggcatgtgagagggacttgtgatgagagcacatgacaccagccacagtccgggagactcatctcccctcctccagtcctgccggtgactcactccctgctccctgaccatcagtcctccagtgtgtgtgcgttgggggtttgcccactaggaagctacttgcatgaagtcaaggtgtctgcagggcagggtgagggggcccaagcatgctaccatctctggccacctgagctttggaaggcagcgggaggggtgggggcagggtgttcttaaatgcggatcttagggcatggaaatgccatactgttggctattgaaacccgtgctgcagattcagtcctaaaagcaggctggacaggtagacatgcatctgtcagtggtggaaagaggccccaggttagagaatcggcttgcttcagcattcgtggtggagctgctggggagtagggaacagggtcgaggcgggtgctttgatgcatctgctcagatttccgtctgggcccagctccacctcctgctgctggagttggcaagtagaccctgccactgagcagccacgtgactttggcgattgttctctctgcctcgatttttctgtgtctaaaatgcagcagtatgtcctcatagggtgattgggaggattaagtgagataacacagtgcctgatccatagtaaatgcccagcaaatgcctcccttgttattcctgtcatcaccactcctctgcccccacctatagccctaacattttgtttctgtttcctgcccgtgttgtgtatttgtactcctctttcccctatagtgtcccacgtcagcgtccctgctttccctcagaggcccactcctccaggctgggtgccccagcagtccctgacctccaggcctgactctgtctctgccaagctgtgtgaccgtggacaatttgtccaatctctctgagctaaaactaaatcagcctgtctcagcccactagtagaagaggcagcaggggtaccaagattccacactggccatgttagttccagcttctgcctactctggctgatgactttggacaagttgcagctcctccctgagcctgagtctcctctggagcgggggctccaccaccccagccccctgccctgttggagcatgatcaggttagtggtggtattgtgctggtgcctgtcctctgccctcccaggccctttgcacactgtgactcgccgctctccgtgcctgtacatgcagttgggccgcctgattctttgtgcctgtgattatctgtgctcgcatctatttcccccttcaagggcaaagactgtgtatgagtcacctctgtgaccctagtctagcacacaggagggctcgggcacgggacacatgtccgaaggactggggtgttttcctgggatcaaacaccccatggtgggatttacaggaaactttttttgtggtagttaatccagttggtgccaggacgaggactctttctcagggacctacagacaggctttagcacccattctgactcccggaagagcacgcgaagctggcccccagctggcactcggtaaccagccttcagtgcgtcagcgggagtgcgtgtgcacttgtttctgggagcgagtactggggctctgcgaaccttcacaggcatccgactccaagaggattaagaaccgtggggccaaatgccctgtgttggacggactgcagctggagcagtcactgagcacggaggccagaaacctgtttttacaaaagctccccaggtggttctgacaacctcgcttggctgtctgtgtgctttgctccgccatccatcactcagtcccaagcctgccttcagacctcagttcaggggtggctggcattgacctcaaagccttttttggagcaaattaacaggtgagcattgaaatactgcagaaattcaagctgagccggccacctgctgcagtagggcatgggggcaggtgggttaaattcttgccttctggctgaccttagtcatcaccagtcattgccttccatgtgcctgtaccaggcactggtctcagtgccttttgtgtattatcgcatttagatatcacagccaccccaggaggtaggtgccgtttgccccaatttgtagatgaggaaatggagcccatagaggtaaagtaattttcctgaggtcacacagtgggtaagtggtggagctgggattcaaatccaggcagccagcctggcgccgaagcctgcgcagtaataacccctgtgcggcggctgagtgcttggacgcattcggtgcaacgtgccatacggtctcttcatctataacccagaatcgtttataaaatagaggcaacagtgctggctttgcggtgttgtggcagggaggagaaacagaaacaggtggggtaagggcccagccttggtgggcacgcaggagggggtcactgtggttcgtggacagcttgagtccctggagatttgtgctgctcctctgtcctcagcattgcctgctgttctgacccttggcctctgggacgtgttcttcctgtgctactcagtgtctggtatgtgataggcgctcaatatattcttgctgcgtgagtgacttggtgaccccgtaaccagtcatgcattcagcatggtgtggccgtgccacgtgttacgagtcagggcagaagacaggcccagtccatgcttctgtgggggtcacagtcaagtgagggagacacacagtaaagaattctcagcaaaccaggcttctgaggactcagattagggagggtccacagggtgtgcaggagggcagggcagaggcagcttcctagaaaggacgtcaccaaggaaatccagcagtaagccaggtgaggagcagtgggaggagtgcaccaggggtggaaggcagagagaaccagcctggtatgtctgaagaacagaaaaaagccagacttagttgaggtagaggcaggctggtcagaggtgaggctggaggaggcaggagagactgctgtgtggggccttatgggctgtgctagcagggagccccagagggcttaagaaggggcctgggctgggcatggggggctcacgcctgtcatcccagcacttcaggagctccaggcgggaagatcacttaagcccaggagtttaagaccagccttggcaacatgacgagaccttgtctctacaaaaaatacaaaaatcagccgggcatggtggcatgtgcctatagtcccagctactcaggaggctgaggtggaaggatcacttgagtccaggaggtcgaggctttagtgagctgtgatcacaccactgccctccagcctatgtgacagagtgagaccctgtctcaaaagaaaaaggaggggcatggtgggtgtttttaacagaatcctgtgtggaggtgacatgaatagggtgagactgagacagggaggccagggaggggccgtgagccaggagcccggaggctgtaggcttggcgtagcctcatattggctgatagctgacacttgacttcattgacttcttcatcagattcctctgagtcctcccctccaccagcaggtttgccgatgccactgtttcccatagcacctctgaggtgactgttattccccttcccttctctccttggatctgagtcccttccctcgtgctcccccagccagcgtgtccttggcctgcttgggacatcctgcccctgcatgggctgtgggaggcgtgtgggctgtgaagtccggtgacctctccagtgacttcacctccacagtcccttcaggtctcacagtacccagatccagaaaactctacagaccatcccaaacccctctggtggcttagcgcaatatcggtgtctgatcagtcttataaaatccagaaaattctgattctaaaacacgtctggcccaagggttccaggaggagactctggagcccgcagcgggcctcgttccatgtttgtgaaatggcagtaacctgagaggcagcacgggagccccctgggtgccagtcccagctctgcccttgggcaaatcacccagcttctttgcctcagtgtccccatttgtatggggattgaggattaaattagcctctacttggaaagcagctggaacagtagctggctgttgcaggcgctcatgaggacatgggaaagttgagtgaggtggtcactgccttgaacttgactggttcctgcctcccccggctgtaagggttaggcaggtggggctagatgaccagcgggtaggatcatctgcctgagtgtgatttcggctcctccacacttgggctgtgtggccttgggcaagtcccttgacctccctggaccactttccccatttgtgaagccattttgccagatgaggactctctcaaagtttttagactctctgggaagaccagagagccaggcctggggcccacgccagcaggagcacaccctgcatcaagtgtggagctgatgccgctcctgttacatagccgccacagcacctccagggctgagcccacgtcaggctcctgggctggagccacacaggaggctggggtctgctgtttcagctaagaggaggtgggagatgtggaggggcttccctaattgcaagaaggtggttcagaggctgggtgccaaaaggaattcgagagatccgtcatgcttggctatgtttcgtacattaagtaggaaggtccatgaaggcaggacccatctttgtcttggctcacctgtgtccccagcaccctccatggtgcctggccctccgcagggtctcacactggatgaattggtggtggatggaggtacacagtaggcactcagaagttgttctcaccccttcccttcctctaggcagctggtactgagcggttgcctcaaggtgggggtggaggtttggaagtgtctgctgacatccgcacagctcatgtgacttgcccagcgcccatctcacttcgcagcggaagcctgggtcgggagccctgcagtcggatgctcccctcagggctggttgggttccagctgggaatgtgttccctggttaggtgggcgggctcctctagcaagctggcgcttgggacccgccggggtcggactcgtgtgccaccttcacacccacccctccctctctccacggtctccgaggctctcaccagctgctgtcagcgatgtagtggagaactgctcgcgtcctgtgcagtcttcccttttgcaaagcaaagcactgtcacagctgaactcgcttggttccccaggacaacagggagggagggtgggagagtggggctgccaaaaggtgaaagcgagccgcagggaagtgactctctgcaggggtcatgcctcctggtggtggtgatggaggtgatggtactcaaagctcccatttatggagcgcttaacagggctaagctctttacatgcatcgttaatcttggaggaggaaacaggctcacagaggtgccaaggccacacaggtagtagaggaggagctgagttatagcccggcagcttgaatggttctgatcctctgtcctgtttcagaaagcccccagggctccactgtaactacaggacaaagtccacacccgtgggcctggtgtgggaggcctttcccacagaacgcccagcctcctagacacaggcgcctctgcctagcacgcccctcgctagtcccctgcccttcctgaccaattcccgttacccctcccacgcctagacgcaggcgcctttgcccagcacacccctcgatagtcccctgcccttcctgaccaactccccctcccgtgctgccttctgggcaaggccttctctaatccccggacaaagctctgctccgctcgtctgggttcccatggcgcctcctcgctctgttgttatttgttcgggcccatctcccctccctggaccagtgctgcagagggctgcatcctgtccatctggctcctgggaggggtggaaccactgaacgcctccaggaaccttaaggactccgggcaaagtggggttgcttatgagcacccaggccgggtgccgcaaagcctttgtaacccaggcactggggctcaggacagtcagggagcatggggtgtggggaaggaagatttcgttcactgagtccttttttcctgcattcattccttcattccttgccaaccagcgcctgttttgcctccactttgctgtccctgccatgccaggtggaggggcctcccaatggctctcctgctccctctccaacccgctccccacctagcagccacagcattcttgaaaaagcagactttgctattcctgtttcacatcacacttgtgacctccctgctgcctttccctctgatctagtgtccctgcaacaggttaggaagcccaggtataacctggctcttgccaccatcgccggccacgaccgagatcaccttgccatgctcttgctgggttcaagccatcgtggcttcctttcagtcctagaacacgcaggcagctccccacatcctgtcctggaagaccggccccacctacgcacacaggtggctctcactaatctttcaggtgccagcaaacccttccttcctggccctcctaatgggctccccgtcaggtggccagcgatctgcttatctgcgggcctgctgatactcttgccctggactggaagcatcactaggcagtggtgggttgggtttggtgccactgtattccccagtgccccagaccacgtggcactgggcctggctctgggcaggagcgcaatatggcaggtggagaaggaagtggcatgcaatgctgggtcttagtccttgccatgagcagctcagacagtccctaccctagcatagtccctggtccagaaaaggaagtgggcagagaggaggaggagctttagggaggggagtacaaagcctgcctctggtatccccccgccagcctggtgagaatggcagcgcaggactggcaaacaggcccgtctttgctgttgacttgctgggggtcataggccaggatgcttgccctctctgtggggcaggatggtgcccggggtcctttcccactgcgcgtcagtgtttcccatctctccatgtaggacaccgcaccatttagggagtgattggatcccaggacctcctccctgtcacggggtggcaggcaaggttctgataattgatctgccgtgtacctttgtggcaggtgacctaattccccattccctgtgacccatgtgtcacaggtgtcaggggcgaccggccacccagccaagcttccatgactccgttctcactctgtgttctgtaatccccttctgtcacgggcttgggatccttgattcccggcccggttctgcctactatgatcacaatgaacagtcagtgttccgtttccctggagggctgccttccttgctgtgcctggacctgtgttccctgctggacaagtcccagggggtcaggcccggggctttctcggtccctgctgtgtctcctgcacagctccaggcacagagcaggtgttcagtaaatgttgttccattaaaatggagttggggctgttgctggcagagcccagggacagcgccctcatggagcctggcttagagtgcccaagtctgacagtggcctgatcctgtctggtcctggggtggagcagacaccaacaggcggggccatctgactgaatgtcctcccaccagctgttaggtccaggtgtttgtgcttactgccttccagtgcagtcaaaagaatccagggctggcaccagccccttcctcatctcaggggtagaggggtaaccagagaggggcggcacttacccaaggatgccctggcacttgggtccaggctcctgctgctctcctcggccacccctccagctgttttgtttttgtttttgttttttttttgagatggagtttcgctcttgttgcccaggctggagtacagtggcaggatcttggcttactgaaacctttgcctcccaagtttaagcgattctcctgcctcagcctcccaagtagctgggattataggcatgcgccaccatgcccagctaatttttttgtatttttagtagagacagggtttcaccatgttggctgggctgatctcgaactcctgacctcaaatgatccacccgcctcggcctcccaaagctctgggattacaggcgtgagccgccgcgcctggcctgtttgttttgagatgaggtcttcctctgtcgcccaggctggagtgcagtagtgcaatcctagctcactgcagcctccacctcccaggctcaagtgatcctcttgcctcagcctccagattagctagaaccacaggcacaagccaccatgcctggctgattttcttatttttaattgttttgtagagatggatttgcaccgggttgctcaggcttcgttgtgcttttgatttgcatttccttatggctaatgatgttgagcatctttttttttttttttttttttttttttgagatggagtctcgctctgtcacccaggctggagtgcagtggcgtgatctcggctcactgcacgctccgcctcccaggttcacgccattctcctgcctcagcctcccaagttgctgagactacaggcgcccgccaccatgcccggctaattttttgtgtttttagtagagacgggatttcaccatgttagccaggatggtctcaatctcctgaactcgtgatccgcccaccttggcctcccaaagtgctgggattagaggcatgagccaccgtgcccagctgatgttgagcatctttttatgtgcttgctgaacacttgtgtatcttctttggagaaatgtctttttagttcttttgcccatttttaaattgagccagccgggcacagtgattcatgcctataatcccagcactttgggaggccgaagagttcgcgaccagcctgggcaacatagcaagacccagtctctattaaaaaaaaggggagccaggcgcagtggctcacaattgtaatcccagcactttgggaagccaaggtgggcagatcatttgagcccaggagttcgagaccagcctggacgacatggtgagaccccatctctataaaaaaatgtaaaaaattaaccaagcctggtggctcatgcctgtagtcccagctacctgggaggctaatgtgggaggattgcttgagcccaggaggtcgaggctgcaatgagctgtggtcttgccattggactccagcctaggtgagactctgtctcaaaaataaataaaaaataagtaaatgaattgtttgtcccttcattattgagttgtgagagttctatatacgtgtatcccggatgcaggacttctcagctgagcgatttgcaccacctgggatgttttcagcgtgtaatgccagtgcatttccttcccgtctcttctctctggctagattcacagccaccgctagataaaaataaagctgtgaggatactgtagatacagttgaatatcctgcttctgcacttcatttttccgtttttttagaaagcatgatttaaagtacatcactgggctgttgtaattcattctagccatttccgcattgctgagcgtttaggtcctttccagttttcagttgcatagataatgcagtgatgttcgtccttgtccataaatcttcatgctcatcacacgggtagccttcttagaaaaaattcttagaaggtgattttaccaggtcaaagggaaggaacattggaagtctcagatactggctgtgcccacattggacagtgagtgttgagggctagggttctgtcgtcatagtcaccactgtagctttagatttttttctgagagagggtctctctctttttttctgcttttgaggtttaaaccatggccagagacagggtctcgatctgtccctcaagctggagtgcagtggcgtgatcttggctgactgcaaactccacctcctaggctcaagccattctcctgccttagcctcccgagtagctgggattataggcgcgcaccaccacgcccggctaattttcgtatttttagtagagacggggtttcactgttggccaggctggtctcaaactcctgatctcaggtgatctgcctgcctcagcatcccaaagtgctggaattgcaggcgtgagtcactgcacctgaccagattttttttttaatgattgaatgaatagtatttgcatgtgggtgccttgatgttaagatggtgtcttgttttagcgagcgttcttttgactactagttaacttcggttttgtttgtttgttttgtatttttgtgggtttttttttttttttaatggagtttcactcttgttgcccaggctggagtgcaatggcgcgatctcaggtcatcacaacttccgcctcccaggttcaagcgattctcctgccacagcctcccgagtagctgggattacaggcatgcaccaccacacccggctaattttgtatgttttgtagagacaggatttctccatgttggtcaggctggtctgtaactcccgacctcaggtgatccacgcgccttggcctcccaaagtctgggatgacaggcgtgaactaccgtgcctggtcttttttgttttttgtagagatgaggtctcgctatgttgcccaggatggtctcgaactcctggcctcaagtgatcctcctgtcttggcctcccaaagtgctgggattacaggcatgagccactgcgcccgacctaacctgtttattgttaacatgttacatggttctgggaattggttcttcatgccctttgcctatttttattttgggacctttataaggactcctctattgaagatagatgtaattttattgtgcagatatatttgtcctcatttatcatttgccttgcaggaaaggtgggggacaggggtgcaggacactaaagagaagcactttctcctctgctatttcaccgagtcatcatagcaaagccccatctcagtgtgaacagcttgggatggagaaacacagggctggggccctcagagagggcagaggaggcagtggcagcccaggccttggaggccctgcagtgtaggagagagggtgctttagtggaggcccggcctgggaaaagggttagcaggttacagagggtccactgtaaccacaactccagccccatttgctgagcaccaggctgagtgactcggtgaacctgctggtgccccacatttttgcagataagaaactgctacttggggtcattggtcacttgctgaagatggcagaagccagggcagccctgcctgggtccctggacacatccagcccaccacagctatggaggctcagcaagtcccaggagcctcaagtttcagcaggagcctggactccctcgtctcccacagccatggccaccacgtcatcagcaccctctgtatgagggtcctgtatgtcatgtgctgtttccttccagtagcttcctgactcttcaggaatactgttctttgccctgaggatctgtcgcccacctgcatctgcagcctcagctctgctccccctctgccctgttggagggtcctcagaaccgactcttccctctgtctggaaggatggcctggacttttgtgtggctcctgttggcttatggcctcctgtccccatccagtgtaagcttcttgagatgggatgtctggcttttttgttcaccagtgtagcctggcacctagaatagtgcctggcatagaatagacaacaataaatatttgaaggaattaatgaattccctttttcttttttttttttttgttgagacagagtcttgctctgtctcccaggttgcagtgctgtggcgtggtcatggctcactgcagtctagatctcctgggcccaggtgatcctcccgcctcagccttctgagtagctgggaccacaggcacgtaccactacacctggctaatttttggattttttgtagagacggggtttccctgtgttgcccaggctagtcttaaattcctgggctcaagtgatcctcctgccttggcctccgagagtgctgggattacagccatgagccattgcacctggccacatttcttacttttactcatcttttaggtctcagtcgaaatgttcttttctcttatgggtcttttctaactattcctccaaatctgaatttgtatcccctgtgttttcccctataatatgcattttcttcttataactggtaaatttttgggtgatttgtttgccttcctcccagtccttgagggcagggaccagccctgttttgttcacggctgtctgcctagcccaggttgttgcataaagaatgaatgaatgaaaatatgttcattagttcccaaacagacctctgagggttggtggcattaccctcttgttatgaaggaggaaggtgagggtgggcagtaagaaattccaagcacctggtttccatcactggagcctttgctggaccagtaaacagcttacagtttctaaaattccaatctaaagcactcccaaagcttctgaattcagatggccatctggtacccatgaccagaagcctgaggcaggtggcccgaaatagcctgcctggttctggcaggactgaatgtctaccgatgagtgctgggctttcctcagaggccccctttcccgagcctggccctgtcacctactgaggacttgggtgggtggcagtgctaggaagcattgagccactaaatgactcagcaaacccttgtcaagcacctcggtgcccccagctctgctgagtcctctgccggattgtcttgcctgtatgctcatttgaccctgacagtgatcttcagttccccaaggctccaagagctctgtctcctctgagcctttgcacatgctgttctgtctgttgcaacactcttctccctcccttctgctttttaattattattattattattattattatttttaattgagacagagtcttactctgtcacccaggctggagtgcagtggtgcaatctcggctcaccacaacttctgcctcccgggttcaagcaattctccagccacagcctcctgagtagctgggattacaagtgcgcaccaccacacccagctaacttttgtatttttttagtagagacaaggttttgccttgttggccaggctggtctcgaatcccgacctcaggtgatccgcctgcctcgatctcccaaagtactgggattacaggcatgggccaccttgcccagcccatttatcttcttggcatatggaatatgtatgtaatgtacatgtaagttgttgaagtgtaatatgttgaagacctgtgagcctccctcctaatttcagagtgagaacattgccattaactcacctctgcctgtgggtgggtggagggagcccactgtcctgactgttgtcattgtcattctgtgttttttattttttgcggggggcgggggtggatgggtgagggacaggtgtgtcaggttcaataaaaagggaaagggtcatcaggtggcctttttaaaagttttatcaaccatgtctgcatgctgaaaagcatggtgtttcgttctgcctgtttttgagtttcataaacatggtattgtgaggaaattcctgggtcttggtttttcttttctttctttttttttttcttttgagacagtctcgctctgtcgtccaggctggagtgcagtggcataatcttggctcactacaacctctgcatcctgaattcaggcgattctcctgcctcagcctcccaaatcccagctgggattacaggctcctgccaccacacctggctaacttttttgtatttttagtagagacagggtttcaccatgtctgtcaggctggtcttggaactcctgacctcaagtgatccgcccgcctctgcctcccaaagtgttgggattacaggcatggattccttctgatacatttcacctggagtgctgggatgacaggcgtgggattaccttctgatacatttcacctggggcgtgagcaagactttcgctagagtctggagctaggaacagaatggctggtcatagttgatgagtacatttggcttctcaaggtaatgccaatctttctgaagtggctctcgccaccttttacctgactgactcctgcttgttctccaagagtctccttcctggctgtctttccttcagcacctacttaggggagcagcagctgtgtgcctagtgtagttatgttctggggggcaatgcgaacaagactcacagtccctgccctctagtggccagtggtgttagatggtccctctttcaggacgcccccaaccccaagtctgggttaggggtttcctttgccccagctctacctactctggcttgtcactgtctagggatgggtctgccttcccgactggaccaggactcctgtgtggacagagaccaggattagggttgtcttggacgctgtttccagcatgaccctgcccggggcacagagcaggtgctgggtgaagcaggtgctgggtgaagcaggtactgttgagcttgaggcagttggggtcaagaggaagaaatggattctagtatccaggactttctggagtaggacctggaccccaaggccatgtaagcccaaagcctcatactttccctaatgcctgagtgttcaagattcctttacctgtgctgggctctgtggcagagggaggggtcacagctcctgccctcgacagcttagagaagagtcagtgcctaactacacaccccttccatagtgtgcagggctggggatgtgcggctggcagggtcctcacagagaaatgtgaagcccacccggccctctgggagctcaagtgttggcatgtcttttctgaagagggtgagggcaggaagatgtgcattacccttagaaaaaaagtagaaaaggccagccttctcatgcagtgccagagcagttagggctgtatgggggccactgtgggcctgtagattcgtaacaggaatcataatagctagcgttggtggaacacccactgggtgccacgcatggcgttgagccctccgtgcatcagctggttttatcccatccatatcccacgaggtaggtggaattgctgccccattttaccaatgaaggagagatccagctcctcacagctagtcagtggcaaatctgaacttcactcctggcagccagagcccagcccctgccctgcacgatggtagcagagcctgtctgcaggcaccaggcattcagagagctttacctcctgtcctcttgactcttcatggcaaagctggaaatggggagactgaggaacagagttacttggccccagtgctgcctctgatttgaggaggcagggtcagccctgggccatcgctgcctttgtccctgagtctgcgttcccctccactccgtgagctcactcagagagttctctccgccccctcaccactcttggtgattatttatccccaggtcttcacttcggcaccatcaggtgcccagccctgggtaaatatttgtctcagggcagacaggagtgggtgtggtcagcgtttcagagcccgggggcaggtggaggcagcaggtggggtggtgactgggggcccctggctggagctggtggctctgcttgctctttgctcatccagcatccactctcccgggggctgctgaggcgttggcctctgcaataacaggggcttccgtttgccacgcgccagccccacactagacgctttacacaagagagttcagtggctgcttttagaagtctttgtgtgtcagtctcagtctcattggctccattttgcagatgaggagactcagccatgaagggtcgagagccattgcctgtgtcaactggggtctgttgagttatcagggccagaatccacctggggccacaggaggtgaatgagggtgttcattggatggaggccaggctttgcctgttcccaggggtcctgaaagctggcaggaaccaggtctgccacctgctctctggaacacatgcactccttgttcctctttctctcttcagaacgtcttccactaggctggccatgggccacacaagcccagccctcctggtgtctggaacaggaccacccagtccagccccctgacccgggcagctcatgcaggcttagctaggaccccacatcctccctgtcaaatgggcgatagagggccagcccacgcttgttggggtggagggcagtttttagaggaggctctgcagacaccccaaataggcacccccaaatacaaggtctgactgcaaaggccatgccctcactaggttgctgttacatgtgtttagaaggtgcattcacaggctgggcatagtggctcacacctataattccagcactttgggaggccgaggcaggaggatcacttgaggccaggagttcaagaccaccctgggcaacaagtgagacccccccccccatctccacaaaatataaaaaattaaattttcggaaggtgcattcacatcacaaggcagaaagtcactagtgtcctcagatgtgtacatccctttgggaagctccttccagctggggggcttatggaggccataaaggaaccccctaactccccctacacatcccagcagaaagccctgggctaggggacagtcttgggcccttgtgttctgagagtgttattagtctccaccacaggattggctgtgttttcttagtggttcaggcatgcattcagcgagtattgagctcagtgcccagtcctgtactggggacacagcagtggcaaggcaagcccggccctgccttccaggcttattgtccagagagagggaagtgtgggaaacaagttggccaaccagcagacagcaccactgcagattgagagaagggtctggaaggaaataaaccaaggctggaacagaggagacagtggcgaggctggtgggtaggtacctggcttgggtcaggatattgaacgccttaaactcttgggtgaggcatggggtccaccaaccagatgaagtgggctttgaagtcaggcctacctgtgctgtgtgtccttggcacatgctccatctccctgcgcctcagtttcctcctttggaaaggatgggggagggatagctgtaccccaaaccgtggcatgaacagaaaggtcaagggtttggctaagagtgaggattgtggagccatagactgctcaggctcgaatcccggctctgacttttactgattctgtggcctcagtttccccatttgaaatggggataataaaccctacctatcttagggttgttgaagacagtaaatgaggtagtatatgtaagtgcttgccattgctcgta[138 bp omitted]ctctgctaaaaatacaaaattagcctggtgtggtggcgggtgcctataatcccacctactcgggaggctgagggaggagaattgcgtgaacccaggaagcggaagttgcagtgagctgagattgtgccactgcactccagcctgggtgacaagagtgagactctgtctcaaaaaaaaaaaaaaagttgtgtgtcacatggggggactcgggtgcttagcacactgcttgactggggacccagggattaaggccttgacttccgctttcatccaagcctgccattgaccttacatgcagctgctgtgtgtgaggcgctgtggcatgagggaaggtgcgcccaatctgccttgttccttccgtcccaagagacttggaaagccatgagtgtgttctgaccgcatctgtttctgtaacaggatcttcagctgcggcaggcagttgggaaggtcaggacgaggggaagggaaggcaggcctgtggcacctgccatctgcgcccttcactggagtgggcaggccttgcccacatccctgcctgaggcctggggtctggaggcctggctccttgttggctatgtaagcctagcccgccccctggagctggccatcctgcagcatgtggccacggtacccactggctgaatggtggtgcctccctgccgggaagggcagagaagagcccctctcacccaggaaactgcaggactcacggcctctcagcaggcctgaggagggcacgggggtctgagagggaaggaccggccatcccagcctcccctgagcaggctaactttccaggacgcattgcgggctcccttccctccagcccgtggttctctggggagaagggaagggtggacgttgtcttcatttcccagagtgagtcggtgcattcgttcattcatagactcacagcgacagacaccacagtgacgtccctagactcagggagcccttggtctaggacagaaaacgagcaagtagatccttagagattgggacgtgtccagtgaggaggcagagtgttgtctgggtgtggtgtgggggatggggatgggggtgctgctacagaaaggggtcaggagaggcttctcagaggaggtgactttttttttttttttttttgagacagagtttcgctctttttgcccaggctggagtgcagtggcacgatcttggctcactgcagcctccatctcccagctcaagcgattctcctgtctcagcctcccaagtatctgggactacaggcacgtgtcaccacacccggctaatttttgtatttttagtagagatggggtttcaccatattggtcaggctggtctcgaactcctgacctcaagtgatgcacccgcctcagcctcccaaagtgctgggattacaggtgtgagccattgcgcctggccaggaggtgactttcgagttgagatctgaatggcaagtcagctgcggcttaagctgcaggaggggagggaagctgtcagagggagggaagagcagttgcagacccggaggcgggaacaaaccacaaagcctgtagagtggctgaggaggcgtgggcgagccgagggtgagccccggtggagtgctggcatcagggggccttgtcctgggctgaggagttgaggttttactctcagtgcagggacaggtggtgccgagtgaaagcctgtggcagcaaccagcccgctcctgcacggtctcctaagctaattgtgcgcctgctttgggtctgaatggcggggactgcacaggacgtgggttttccttctacggtgggaggtgatctcagggagtctccctgcaggtccccaccaggtcttctgtgtgcctaccatgggcatgcagttctgaagcgctgactggtggtgggaaacctagcctggagattgtcccagccatcccacccaaggcagggacaggccagtggggctacccgagcaaaggcttagggcagctggtagaccgggctgcaagaatgaggccgcagagttagtcttagagtagcacctggcaggaggctggctccgtaagccagtgctcgtccttggcattgttgactcagtggctcagctgatgagcccgaggctgctggggaaggtgtcctcctcagccttacagctccagcccccgcgtgatccgcgtttctcaggcctctgggttactgagaggctgttgggggtggaggtgcccagcggttgttcactgggaagaagaactcaccaccagcgtcccttcatttttcccaaggagtcacaggcagaggtttttccgaacaggctcagcagccagaagtccccgcctgggcttccaactgcctacagaggtagctgcagccctcccctcaggctggcctgtgtcactgccctattctatgtccaggcctcccggcacccagccgctgtccccatgagtgcccaggggagctcccagtttagcagggggagagggttccccagtgcagagtgggtgggaagcccggggcctgtgacctgtgtcacagggcatctgaggatgttgttcctggaaggcaagtgtgtggccacggagctgactttgggctctcatttaggaggctgactctgaaggtcatagtggctcagcagtgaaagaggaggatccccacagtgtgtggtctgtgtggtcactcagggatgtgacctttctgaccctcctcttctttgtcttgggttgggggtcccggccatatccccttcccagggatgtgctaaggtttcagggagctcgggtacataaagggcttgcctgagataactgcgtagtaaatgacagctgtcagtggactccctgccgaacgttgggacaccacagttacggacttgtgccaggagccccagcttcctgccacccctcaccgtgtacctcagagttctcctttgacaaccctccatctggctgtcctgtccctcaggggtgggcatgaggcccaagttccttccttcctttagcccacgttcactgagcacctgctggccgggccccagggagccacccaggtggctgcctccacagccgggctgggctttataactaattctgtcgtgagagactggccttggtgccagacctccctcccggcccacctgccgcctctgggttccttgtgggccaccgcctctgagcagctgctgcttttttttttttctcatttaactttttgttttgttttttggtttttgagacggagtctcattctctgtcactcatgctggagtgcagtggtgtgatctcactcactgcagcttccacctcctgggttcaagcgattctcctgccccagcctcccgagtagctgggattacaggcacgtgccacaacacccgtctaatttttttttttttttgagacagagtcttgctctctgtcacccaggctggagtgcagtgacacgatctcagctcactgcagcctctgcttcccaggttcaagcgattctcctgcctcagcctcctgagtagctgggattacaggcatgtgtcaccatacctggctaatttttgtattttgtagagatggggttttgccctgttggcccgactggtgtcgaactcctgacctcaggtgatctgcccaccttggcctcccaaagtgctgggatcacaggcatgagccacggtgcctggcccgtttaactgtgttttgatggacattttcagacacaagaaagtaggagtataatgagtctgatggaccgacccactttctggcttcagaattgatgactacatggccaatctgttcctgcctatctccatgccactctcacctgcattattttgcagcagctctaagatagctatcattttacctatacattgcttgtgaaacagtgggaacactcagccccaagccggcaccctctgtcctccactgtcatctgccccaggcccaggatcagaccactgggaaagtggccaggtagggctgtgtctcttgtggctctgcacacatgagaggtggtgggtgtggtgctcagagaagagccagctccaccccccagcaccccgcacaaccttgctgtttgaaggaggccgccgccccaggaggggctttaggggctgccaggaagcccggagaagggcctggggtccctctttgttcctggttcccggctgcttcactggctactccatctctgtgttcatttgcttttaaatgaggagcacagattt[136 bp omitted]gcctcccaagtagctgggactacaggtgcccgccaccacgcctgactaatgttttgtatttttagtagagacaaggtttcactgtgttagccaggatggtctcgatctcctgaccttgtgatccgcccaccttagcctcccaaagtgctgggattagaggcgtgagccaccgcacccggctttccccacttcttgcataaagggtagcattcatgagcataccgttctgcaccttgcttttttcatttgtgtcttgaaacctgttccctgttggctaagagagcgcacactcattctctgtggcggcagggctccactgcgtggatgaactctggggagctagccggtccctgctggtggatattgtggttggttccggttctgcattcacaagctgctgcagtgactgtccttacatgtatgatttttcatctttgcaagtatgtctgtaggattaatctccaggtgtgtaattgctaatcaaagggtatatgcatgttacttttttttgagatggagtcttgctctgttgcccaggctggagtgcagtggcgctgtctcattgcaacatccgcctcccaggttcaagcgattctcctcccaagtagctgggattataggcacccgctaccacacctggctaatttttgtatttttagtagagacgggggtttcaccatgttggccaggctggtctccaactcctgacctcaggtgatccacctgcctcagccttggcctctcaaagtgttgggattacaggcgtgacccactgtgccccgcacatttgtacttttgactggtcttgccaaattgcctttgagacggaaccatgtccttggtcaggtcctttctcatctctaagcgtcccctggaaagttggggagataatttctatttctcagggccattaggaagtggaaacgagatcgagtttgtcaatcgcttagttttgggagtgggcgcaaagttacggctccaccggtaaagcacagtagaagggccccaagcagtgtttgttctcttcccccatgcctctctgctgagtgccactggggattgtaggagtggtgggagagcgtggggatgattactgttgggaaatgcatggcagtggctggaagagggggtcagaagcacagacctgcatttacactcacactctgggatgagggactttcctcctcagggcgtctgtctccctgccatgggaggcagtgcatgtgtcagccatggccctcggctgtaagcccagaaacagacccctgcagaatttgtagcaagggaatgtgtggggaggatgtcaccaggcaggaggacagctgggccctcgcatgggcgggattgaggccactggattccctaggtagggagctccccaaatacaggaagaaggttagaggcaggaagagccttttctacccaggaaacctgaccagtgccacgcagtgaatatacagggtcctcacgcaaggacctgagagatgtgtgggcagctgtgtgcagtgtatacagggagtccaggggctggtgtgagccctgctcttgaggggcctctggatgcccgcggtggggtgctggggcctccacgggcgtcattctgtggttgctccaggattggacttagaaatctgggtttgactacatatcaggctgccctggggcccctttcagtaaagatactcccctgagaaatacctgcccttgggaagcccactgcattgggcttacatgactgatcagactctgattctgtgtggagcagcctggggaagggcttggaggcgggagtgaggatggtctccacgtgggcagtgtagacgtgtggttttgcagggatagagacgtgcagcagcacatccgcagaggtagcgaggccttgggggtgtggggttcccacagaaagctctgtgggtactcttctgcctcctcctccctatttcaggccccaggaggccttgtgtggttctgtccctcccctgccccccaactgaggccgtggcattgtgggagcagaggacggaactggacacctagtgaaggtgcgtagaaggcatttgccccaggctggctctgggctgagcacacccattggtgacctcatcacgtgcacaccttcgctgcctgagtgcagggcacccaaaagcctgccatagacaagaagggaccttccctgagttcacccagctggccctgtctgagttggggactcacacctgtgctgactccagagacccaccccagccccaccttcctgttccttcagtcaacacatatttattgagcacttactgtgtgcccagtaaagacccttctggggatatttcagtgaacaaaaggggtaagagttctcccctcattatagcataaatgcacagatcagtacgcttcctgctgggtcatgagaagtgccacctagagaaggaagcagggattcatagtgataaaggggctgactttttggagggtggccagggaaggcctttgaggaggtgacttgggagtgaagacctgcaggcagggagggaaggagccgttggggtgtgaggaagaggggtgctctgggcagggggtaacaggtgcaaagaccctgaggcactgtgtccagatggctctgccactggcaaggatcaggacctcaatgactgtagcagcccctccccagcacccccaagtgaggtctggccatgcagctctcccatgtgcatgctttgcctcccgtgctccataagcaggaccttgacccctccagcctccttgctgacccctctcgtctcacactccaggtcccgatctgtgcagctcactgccagatgcatcaggcagcctcctgcacctgcactttcttcacaaagttccctctgccagagacgccttttgcatctttgtcatctctgagacttttccagatgcctcccgctgcagctgatcccagcctggccatcctccccgcctccatgtcccctccctccctccctccatcatagccttgatgctgttctgccactgcccctggatttgtctcactgattgtgcagaaggctctgggacagagctggcttgtgggggattgggccactgcctattggaggcatttgggggctgtcccaggggtgagtgcaccccaggctggaccaggtgcccacacctctcccgcccagcactggcacctgtgaagggcctctggaggctgggtcttcctgcaggcaccaggaagaaacctacgagcgcatccttgctgagggcaggacccgctctccacatcctggaaacccaacagagaaagacagtctctctggcagcctccctgtcttgaagttcgagaaggctgcatttctaggctcccacaacctgtctgtccggtttgaagccggggcctgagggcttcagggtactgatgcaggacagacagctctggttcaaacctccctctgtccgctcccacaggtgtggcctcagaagaccattccctctgtagcgtggtagaggctggaaattctactctgcaggattatgatgcggattaaatgcagtaatcgagtgtttggcagagtgcctggtagggaaggggttcagtaaagagctgctcgcaccattctgtgcagggaatgctttagggcatgttttagaattttagaacgtgtttcactacatgagtagcttcttgcagctttgaggccctggcatccctctcccctgcctgcaggcttccttgttcactgggccaagtccccgcagtaatcttcctaagcatggagtagaccgggcccttcctggccagaacatccccatctaccttcagggtctactgcagtggccagatgtgagcttctcctctgtccgctcactcaccttctctgtgcctgtcttggccccttctctgtgcctggctggccccatgtggagcaatgttggggtaacagtgtggaccacagaccaccccatgctgtcttcctaggactcatagtccagtgggggagacacacaggtctccagatggtgacaactcagaggggacagggctgagacggggagcccagagggtggggcctgacctaccgtggggatcagggagggcttcctggagaaggcatccctaagctgagaattgaagaagtagtaagcagtgagagcatgtaccgtgtaatgtgtaaaggggagggagaatgtgaggtgctgggaagcaccgggcccttcgggggacgggaagaatttgggtgtggccagagcacagtgccccatgagtggagaggtccagattgtctatttttcttttcttttttttcccccaatgatcctagaaattctcccaagagaggtccagattttttgacaaggctgaagggcggcccctgagacctgactctacctgtctgcctggcctttcctcagtccagtgcgtgcacggccccctcctcgctctcacgcatcatctgtgtgctccttccctgccagacaagaacccctggagggcagggaccagttcagagccatccctgtctccccagtgccagcacagagcttggcctgagtaggttttggggactgggcttggtggctcacacctgtaatcccaacattttgggaggctggggcaggaggatcacctgagcccaggagttcaagaccaacctgtacaacatactgagacccggtctctacataaaaaaagaaaaaaaaaaaaaactggccaagcatggtagggtgtgcctgtagtctcagctacttgggaggttgaggtgggagggtcacttgagcccaggagtgcaaggctgcagtgagctatgattgagccgctgaactccagcctgggtgacagatggggaccccccaaaaaataggttttgggaaatgtttaccagatgagaggcaagacggaattctcctaaattcgaagcttggaattctcctaaattcgaagcctgaggcagaatggttgaagcaaaaagaggagatttgttgtcttatgggtctgaagggtcctgaatagtgtggtgtcaggcacagtatctctttatc[209 bp omitted]gaggcaggagaattgcttgaacctgggaggcagaggttgcagtgagccaagatcacaccactgcactccagcctggcgacagcgagactccatctaaaaaataaaatatctgagcttggctttcctctgagctggcttcattcgcggaaggctgttccctcctgatgggtgcagggatggctgccagtagctctagaaatgggatgcagtcttaaccaccctagtgggaagagagctcctctttcctgagagttccatctcagggcgtaggaccggctgtggctggctctgtaaccttcctgtccctgaccgatcattgtaacagaggttgtgggacggggcacctatccactcctagaacctttggggaggacagcggggagtcaaggtaaagtgaagaggcctatccaggctcctggggtgagagagattgggtgaccaaggctggtccacccaggggaagacaggaagagaagtgggccattctggcctcagacctcttcgtcctttcccagaccccacgccaaggcagagctccctgtgggatgagtttctcacttgacctgaaatctctacttgtggggctgctgcaagtgcacaggcttcaggaaaggtggaccacaccccctgtgccccaggctccttcccgagggtgtgcagcccaccatccagataggggtggatggtgcccaagtcgtgggggctgacaagcatggagagtcctgcagagaggcccagcaccggattcccaggctgctccttgagacgctgtcccacatgggccggtcactcacctgccatgagactcccaactgggaccttccctgcagagcctgtgaggtggaacgatggtgatggtgcccccttgtggggtaggtgcatgtggcaggcacagagtggtggcagcaactgtaacatacggttctggagggcagggacaggggcccttcctgtgtgccttgtggtgctgagtgccaggctgggtgagctcaccaagccctccctgggaaggtgctgttgatgcagcagggaggcccagggcagtcactgctctgtgctgttggcgacggagcagggattggaacccaggcgcctggcttcgaggcccgcatgctgtggggaaatggggctctgccatgttggtggttatttattgtcgtgaacaagagctcaggcctggtttccaggtgtgactttattgcaccctcgccctacctccccggcttgagaattctggaaaataccacaataagtgtttcttttctcttttgagattatgtaaataatacttgcctccatgctcttaaaagaaaatgacatctctatttccatgtgttgcggtgtttcctggtttgggaccccaccagctatccagtcacccaggcttgaagccaggttcttcccagcttctctctccaccctgcccatccctgtgcatgtagcagtgaccaggtcctatcgattatctgattatctgccggaagcctcaggaatgggagccttctgagtcagcacatcaccaggagcacggcctgtggccaggctgctcaggggctggtgatgttggtttctttcaccttaatgtgtgagttgtgtagtaatacggtcctatatcacttaatgatgacacattctgagaactgcgtcgttaggtgatttcatggtcatgtgaacatcctagtggacttacacaaacctaggcctggtcaggcctggtggctcacacctgtaatcccagcactgtgggagttctagatgggcggatcacctgaggtcaggagtttgagaccagcctgaccaacctggtgaaaccccatctctattaaaaatacaaaattagcctggcgtggtggcgtgtgcctgtaatctcagctactcggaaggctgaggcaggaggagaatcgtttgaacctgggaggtggaggttgcagtaagctgagatcatgctattacactccagcctgggcaagaagagtaaaactccatctcaaaaaaaaaaaaaaaaaaaaaaaaccctaggtggcatgcctactgcacacctgggctacctggaatagtctagtgctcttgggctccacacctgcacagcatgtggctgtgctgagtaccctcggcaagtgtaacacagtggtaggtatttgtgtatatgaacgtagacaagggacagtaaaaatatagtgggaaatcttatgggaccaccggctgcatatgcagtccatcattgactgaaatggctttatgcggcttatgactagacctgtatgtgcctcagtattcaaaagatgtaaaaaggtggacagagattcaacataaagaaatgatcaatgtttgggccgggcgcggtggctcacgcttgtaatcccagcactgtgggaggccgaggtgggtggatcatgaggtcaggagatagagaccatcctgactaacacagtgaaaccctgtctctactaaaaatacaaaaattagccaggtgtggtggcacatgcctgtagttccatctactagggaggctgaggcaggagaatcccttgaacccgggaggcagaggttgcagtgagccgagatcgtgccactacactccagcctgggcaacagagcgagactccatctcaaaaaaaaaaaaaaaaaaagataaatgtttgaggtgatatgctaattaccctgactcaatccttgtatgcatttatcgaaataccacatgtaccccataaatatgtataataattatgtattaataaaattaaacattttaaaaaatgtatatagagagaaggaagtttctctctccctgtcctcctttggctttgccagctcaccttcctaaaagcagtcacctagtttattgtatgtccttctggaaggatctctgatggagcttagctaatgacaatccacagcagccacagcccaggccagccgacagagtttgtaaataaagttttatttgcacatgtccaggctcatttgtttatatactatctattactcttttcatgctacaaggcagagttgagtagttgctgcagagcctagtctgatcatttaagcaaaatattgtgatgcctgcagctgtgtgtgtttaaagtcaaggcagggtggtagaggcagcggcagcagcaggcccagaggcagcggttgggtttgcagcgagaagacaaggttgagtcagtgtgtttgcgagagctggaatcgaagcctcttaaaatggcagatgatttggacttcgagacaagagatgcaggggcctcggcctccttcccaatgcagtgctcagcattatgtaacactggcttcgtggtgctcaaaggctggccctgtaaggtctttgagatgtctgcttggaagactggcaagcacagccgcgtcaaggtccacctggttggtattgacatctttactgggaagaaatataaaaataactgcctgtcaccttataatgtgggtgtccccagcatcaaaaggaatgactcccagttgattggcatccaggaaggtacccctcactgctccaggacagcagggaggtgcgagaggaccttcttcgtctgccagaggagaccttggcaaggagatgagcaaaagtaccgctgtggagaagggaccctgatcaccgtgctgtctgccatgacagaggaggcagctgttgcagtcaaggccatggcaaaagaactggctcccagggtgacagtggtggcagcagtgatcttctgagactgcagaggccccctcctctggccttctgtaggctggactcttcctacacaatgtatttgatgttttattttgtttttcccaccccttcaatctgtcggggagcccctgcccttcacctagctcccttggccaggaacaagcaaagccatggccttggtgaagctgccatccttttccctgctcgcactacagccctggttggggggagacggtgggcgatgcttgtggtttatttatttgagacagagtctcactctgttgcccaagctggagtgcacggggcaccatctcggcttactgcaacctccacctcttgggttaagcagttctcctgcctcagcctcccgagtagctgggattacaggcacgtgccaccatgccaggctaatttttgtatttttagtagagacagggtttcactatgttggccaggctggtcttgaactcctgacctcgtgatctgcccgtctcggcctcccaaagtgctgggattacaggtgtgagccactgagcccggccttatttatttattttaattcaatctggaatcagaaagcggtggattctggcacatggtccttgtgccctccccactcacccctggtctggtcccctgttccccatggtcctataccctaagcacgacccccacagactaaggccagccccctgccgtacctgtgcctctccccaaacccctttagatggggagggaaaaggaggagcggggaggggtcctgcccccatgggctttacccttccctgcggtctctctccccaacacatttgttaaaatcaaacctgaataaaactacaagtttaatatggaaaaaaacaataatagtcgaggcagacctgggccttttagtctgtactcttgcctctgtgagccttgactctgaaaaggggatagtaaaaggatgtctcttggggtggctggggggcttctgtggggtccaggcagcacaggacctaaccagcagggtgccaagcagggggatgcctgggctgcaggcattgactcgcctgtgtcccacaacccctcttggagctggagcactagcgggggctcagctgccaaaacccagggacaggtgaggctgtcaccatccaagatggcaatctggtgtgccattcctgactgccaacctgcacgatcaggtcccctccccgtgagtactacaggggaccccactcctgcagaatacaatcctcccatgagcctgaatccatcctgttgctgctctgcccctcgcccccagtggctccggtctcctgcagaatgagagcgaagtcctcaccagggtccacggggtcaccgtcccacatcatccccagtgctcccctcccggtgtgctttggcgccgagcctgctcccaccgtcacacttaagcctgccccagtggttgctgcctgccacggggtttgcacagggactgcgcagtgggcctcctgaatgaagacccagacctgagcccggtggggcctctgggaacactcctttcaaggccagctcaccctggctcctttctgttcattccaaaataacaaaataacacctgcattgcaaagcgtggttattctgagcctggttgccatcacagtcatatggggacctgttaaaatctgggcccctgggccctagctaggacctcctgactctggtgctctgtgaacctggctcgcagacgtcccgatttcatgtggtggacactggggcatgggaaggtcatttccagccagaggtagcatggttgttacggagcagccctaaatattcctgctccaggcttgtctggacttcctccctccccatccctcctctgagagttgacaccctcccactgtgtcccccagcccgcacagtgttgcttcctggtgttttgactcccacttggatgactgtgtctgtttcccccgccctgctccaggctggcacggatggtgtgagtcatcaccgccccctgatgcccaacctgtccttgcatctcttgggtaccattgcacctgtgtgcaaatgccagacagacatctctctgcctgtcacctgatgcccggcgtcaggtttctctctgtccctttgtgagggccacagccggcgggagtgggaggcaagctctgtttgcccttcatcctctccctggggagctggctgccacctgctgggcgagcggcagagccccatccctgcagcagcaaggccctgcccgccagctgctgcacagcagcatctctccctggagctcatgcctttcaccatcccacccagggctccccacaccctgcctccgccccagcccttcccctcctcaggccagacaagggagccgagagttgagctgtgctgtggtttcaggtcaagacagtcctggggtgtgttccagtcctgccacttccaggctccatcccttgggcaggtgtcttttcttctcccagattgcttccctgataagatggaggtctagttatgccagcatcataggggtgctgagctggccaagtgaaattgtgcatggaaagtacttaggagctgggtgaggcggctcacgcctgtaattccagcactttgggaggctgaggcaggaggattgctggagcctgggagttcaagaccagcctgggcaatatagcaagaccttgacccctttgttttttagaaagtgcttattagcactatgcattacacagagtaagtttctgataccgggaagtggctgccaccatcaccaccaccatcatcacgtttttctccatttgtgtctcctgctgactaagccacactgtgacactggtgccagctacttcatgggtgctctcacgtcccttgttgcctgcgaccccacaggtgtccctttcagggagggaaagaggttgctgtggtcatttaacacagcctcggcaggccagggatggaactcaggtcttcttattccaagccgttacctctgcagatccatccccaacacatgcctgctttgtagaaaatactcacacacccaaacacatgtgttttgaacacacctgtcctcctctctgacagccacttgaattctggtccctgcttaatgggccttcagagccttggacttgagcaaatgcatctgagccctgaccttgagacccacactcacacacgtgcccacccccacatacttgtgtgcacatggtggatttactgcatgctggaaaaacaagaggaatgtaaaagctaaggagcagttacgtattttttcttttcttttttttttaagagagtctcactctattgcccaggctggagtacagcgacacaatcacagctcactgcagcctcaaactcccaggctcaagctatcctcccatctcagcctcccaagtcactgcgaccacaggcatgtgctaatttttgtattttttgtttgttttgtagagacagggtctcactttgttgctcggctggtcttgaactcctggtttcaagtgatcctctcgcctcagcctcccgagtagctgggattacaggcacacactaccacgcctggctaatttttaaatttttggcagagatggtatcaccatgttgcctaggctggtctcgaactcctggcctcaagtgattctcttgcctcagcctcccaagtagctgggactacaggcacgcaccaccatgcccaactgattttttagttttttgtagagacaaggtctccctatgttgcccaggctggtctcgaattcctgggctcaaaggaacttcctgccttggcttcccaaagtgctgggattgcaggcatgagccactacccctggaccaagtgagcatgtatatgtgtgtgctaagcactggttccagggagggaccctactaactcactcactcgccacacgaccctgggagttagttacactcatccccattttagggataaaacagttgaggcacgggtcacattgctttgctcaagagtttgagttgggcgctaggatttgactccaggcagtctcgccccagaactcatgttctttttgtgtgtccgtgagaaggagtttcactcttgttgcccaggctggagtgcagtggtgcgatctcagctcaccacaacctccacctccacctcccgggttcaagtgattctcctgcctc[225 bp omitted]aggtgggacctgtgagatgctgtgaagcccacctaaggtcactgagtgtgtgagagagacagcaaagatcccagccccatccctcagggccacagctgtgccctaaccactgcgcagcccttccctttggaacctggctctgagctccagcccaggccctacaccaaagcctttgaatgaactacagtcctgccatggctgtttggccttgcctgtggaataggggtcctgtggctatgctcccctggatcctggggacccacccctttatgagacttcagtcactctgcctggaagccgtgactgacaaagatcacctgcttcctgctgccttaaaggagacactgggcatcacatgaccttttccatgtccatcatggggtcatgtgggctgtgacatggcagagtcagatgggtccaagctggccctgtggtcagacgtggtggacccatcacctcccctcgtgagtccgcattgagtgcagatactgaggaactgggtgtgaaatgcctcgggtagcatctctcatgtggttagtgctcagtacgccagagtcagttattttgacccacgcctgctcatgaactgtttcacgctgccattttcttcttagccacctcctcacaccattttaaatggacaggtgtgtgtaggggcccatcctgggccagccagctgctctccctgcaactttggacaagttatcgcacctctgccccatgccgcagttttctcctctcttttttttttctgaaattttttttgtagagactggctttgttggcaaggctggtctcaaactcttggcctaaagcaatcctcctgtcttggcctcacatagtgctgggattgcaggcgtgagccatgtgcccagtctcctctctaaagtgggaggatactaatactcccgtgatggaagtgatcagggaattgaagctgtgtttatttgcattggaagtgctggggatgggcctggcgggtgtgagtgctgtcagcgcgaacttcctctctgatctgcccatgctgctctttcttttttcttattaatagattggtttcttttttatttgaatacatttggcctcatttctaagcaatagtatttgtaaaatcttagttttggtgtgctcattccttttttttttttttcttgagacagagtcactctgtctcccaggctggagtacagtggcacgatctcggctcactgcatccttcacttcccaggctcaactacttgagagtgcctcagcctcctgagtacgtggaactacaggaacccaccaccacgcccggctaatttttgtatttttagtagaagtgcatttctacggcgcttctgtaagcacttgggcggatgtgacctcctcggtctctgactctggtggtgactcctgcaaggccggacctggttccagaccctgtaggtgcccagctgaaggtgtggtctgattgctgtgtggggagtgaaggttgccagcctagaaactgggcctcaag[143 bp omitted]aaaccccatctctactaaaaatgcaaaaattagccaggtgtggtggcgtgtgcctgtaattccagcaactcgggaggctgaggcaggagaatcgcttgaaccagggaggtagaggttgcagtgggctgagatcatgccactgaactccagcctgggcgacagagtgaaactctgtctcaaaaaaaaagaagaggtgccatcccaatgcatgagaccggctgccattgtgtcaggggttatggtggtatccaccctgatgccacagccagctctgggccagcctcctcgccccagcggtgcccacccccagcttgatcctggaccctggcaatggtgtgacatgagctgctgctaagcgtttgcagtgctaggcccgggccggactttctccacaaacgatttagttccgttagttcacccaccctgtaaaacagctacgcttctcttccccgtttaaagcttgaggaagctgaaatgtggagagttgagagtggctccagagctcctgagccaggggctaggacttgaaccctggcttcagccgccacagaggacagcttagggtgggcctggcctggctccctgcttcacagagtcgatgcgttcgctcctggatgaagcgcctggcacgaagtccgtgggcagcgctgctctgtgtgtcttgtgaattcttcttatgcttctgatagttcctccaattttgcatttcctttttttttttttttttttggaaatggagtttggctcttgtcacccaggctggagtgcaatggcgcgattttggctcactgtaacctctgcctcccaggttcaagtgattctcctgcctcagcctcccgagtaactgagactacaggagcgtgccaccacacccagctaatttttgtatttttagtagaggctgagtttcgccgtgttgccccggctggtcttgaaatcctgacctcaagtgatccgtccacctcagccttccaaagtgctgggattacaggcatgagccaccatgcctggcctggaatgatgatttttaaggcgaaacattaaataggattgcaaaggatgccagttggaatatcattagctaaatgctcttcctcactgaattgacatgtgaagcgataggatgtagcagcagctgtaataaggccttcagtctcagagtagtgatgggcattcagaatctgcagtaacttgatgcaatgggaaaatatctgtcgtttcttttcatgtcagtctcaaggtctgctaaacactgtttcttttctctctctcttttggcctctgttaataagaaggaaatgctaaatttcagttccattcatgaaaataaagagataagtgtctcccctcaagttcgtgggccctttgggggtcaaatggttaagaccagggcatgcatgggcttgtccatggcttggggtagctgctgcagtcctgggggctgccttcccaggcagggcaagctccggtccccactagagctccagggtcaccaagcacatgggcctttgtcagacagctccctttctgtctgcaagaggggcacctgccatcagctgatcccctgcagctcctcccaggcctccacccccaaggaggaggaagtgctcaggcagggaccaggcctgacctctggggaggctggcggctggcctctgtcggcttctttcctccagcaccgcagttcagcaacccaccgccacccagcacagtggccagagcggagtcccagggtctgatgttagactctgctctggaccagccacctggtcccagggagacaccatactttacccagacctcagcttcttcccctagaaaatggggcagtgcttgatgagaccaggggtccagagcccctggcctagcagggtggcaggaggaggagtccacacggagatattactggactgggagctctctcagggactcccactgcgtccagcagcagcggattggcagcagggcgaggggccccccccccaagaagctgccagcaagccctcttcctggcccccttccctgcccattgtggcatctccatgcccaatatctgctggcccgaagatctttctaacggccagtcctgacctctccctcttctgctcctagcctttccttcctgctccgctggtcaccctgaggtaaaatccaagctctaatagccaaaaactggaaacagtacaaattcctgtcagctggtgaatgggcaaacacaacgcagcacatcctataattactcttcagcagtataaagggactgaaactcacgctcattatgctcagtaagagaagccaaccgcagaaggccacacagtttcaattccattttaatgaaatgtccagaaaaggcaaatctgtgtagatagaaagcccagccctcccttccgcatggtggcggctgtggccctccagggaccggggctgcagctgttgggtttgggctacgtcccttcattcatgctgggagccactgcctgttagcctgggaacacccgggaccaggcctgtctcttccaactgcttctgtgtcctgcgtcaaggggccgggccctgaatagcgtacggcgatgtttagctgttgagagtgttttgggagtggggatcctgagaggcacgtggcattgtagttgagagctgagttcaaagcccggctcgcatatataccaggtgtgtgatcttgggcaaggttgtttctctgagcttggtttcctcatagggttgaagtgaggattcattctttcacccaaaaatacaaaaatacaaaaaaaaaaaaaacaaaccaaggaccaagtacagtggctcatacctgtaatcccagcactttgggaggctgaggcagaaggattgctgaagcccaggagttcgagaccagcctgggcaacatagtgacaccccatctccaccagaaataaaaatgatctgggcgtgacagtgcaagcgtttggtctctgctgctcgggaggatgcttgagcctgggaggtcaaggctgcagtgagccatgttctcaccactttacttcagcctgagcaacagagtgagaccctgtctcaaaaacaaacaaaacaccgagacagtgttggagacatggtggtgaccaagacagccccagtcctgtcctcctgggctcccgggctagtaggggaggtggctgatgtgtagaaagattgtgtgctgttcattgtgtatttgtgtgaaggtgcttggagcggaggtgaggcgtggagggcagtggtgacttggggtgggggtgcccaagggcactttacctcgggcagtggccagcggggggcctgaaagggaggacagagctcaggcagcctgttgttgggggagggctgaagagggcagtatgggcagaggccttagggcgggagtgggtggagccccatgaaggactcggggtgtggacagtcacaggcctgggtcccctgtgcctgcagcccagaatgtgaccgtggacgaggtcatcggcgcctacaagcaggcctgccagaagctgaactgcaggcagatccccaagctcctcaggcagctgcaggtatgggcgggacagggtgggtgcgtccggtgtgggtgtcaaggggggccctagggtggaaccagcccagcaggagagggcctcccactccccagccccaggtgttcatgaatacatctttgaaagcctgctgctcagctagagaatgaatcagtttcttcataaatttgaagagcacagaattctataaagtaagacattcaggtatctgtcagccccaaaagaaacgctgttccctggggaagaggcatatctacgattcttgtgagtctgaattacaaaatttatgtattctttttttttttttttttttttttttgagatggagtctcgcttttgtctcccaggctggagtacagtggcgccatttcggctcactgcaacctctgcctcctgggttcaagcgattctcctgcctc[133 bp omitted]acctcagcctcctaaaatgctgagattacaggcatgagccaccatgcccagcatattcataaaagtcagaattacagaaataacacatatcctcagatttaaaaaaataaaaatactacagatctgaaaagccaaatccacctcttatctcttgccccaaggccccctcctcgggaacccccgttgttggccactcggcatttcctggccttttctgtgcgttggcaaggtggctattgaggggtacctgctggttttccatttggtcgctctcccaccctgccggtcccccagccccctccctcggcacctctcctgtgggccccggcctggcgcctagtcagtgaagcaccgctcgttccgagggttccagggttgcctgtcctcgggctgttgtaccctcagctgtgctggaagcaaccacgctccttgtccatcagtgttcactggagttagggtaggttctctggaacattccagaagaggggcttgtcaggtcccaggaagggtggctgctcagtgtggcagctgagagggtgggtccttggaccccatcggcctggttcagaccagccctgcagcacccaccctgcaggtgatgtgtgtaagctcagagcgcgggtgctggcatctgcgggacggtgggttctgactgggtgctgggccccaggccctgccttcaccaagaagcctcctgtgcccagccttgccatcttcccaggctcatttcctgcctcacagcctttgcacagactccctcctctgctgggacatacccagagatgctgggcccactccctcactcggtcccgctggggcagagggcttcgcccaggcctgcctggctgcagtgctggctggtcctcagttgtgtgggtgcagagttctctcgctgtctaaggccctgtaccccaggttccagctggtgggtggcctctgagcctctgttcagtgccttcgcccaaaccccaccccagaaccctgcctgacctcaggcatagcagccatttggggcctcggctgcccccctgttcaagtgtcttcctgccttaaccccactctactttctcaggaattcacagacctcgggcaccgcctcgactgtctggacctgaaaggtgtgtgtctggctaggggttgagagcccttgggtcatgggcaggtcgggggctccctagagctgggtctgaggacctgcctggggttagcggcttctggagctgagctcagccagggcaggggctgggcctggtggggggtgggaggttgggggcagagggcccttccagccatgcaaaggtgcactgtcttagacatgcgcacggctgctgtctccccccaggtgagaagcttgactacaagacctgtgaggccctggaagaggtcttcaagaggctgcagttcaaggtcgtggacctggagcagacaaacctggatgaagatgtgagcggccctgccaccgcccacttggctccctgagctcccgggccccttcgaggtttgggtggggagaggacactgcaggaggagggggtcccctagacaaaggctgaggggtggcgcaagggcggggcctcttgcagggcaagagggagacatccaatatgaccagagtggatgtggagggcgcgttggggcacctatggcccaccctcataagcaaggagagccttagggagctgggctgaggggcaggcgtgtggcccccaggagccctttcaggaaccacgctggagggtccagctcctacagggtgggcttgggaagcattctgagagcagcctcccatcaaggcccaagggccctcacctcctcagccttgggagtccccaggcaccccaggtgtcgggatccaggggcaggggacctggagaactgaggcccaggctcaggaacaccaaggcctgtcctggtcactcagcacgtcagtcaaggactttggagggcaagtgacagaaaacaaaactgactacagcagagaaggaaagggtttgtccccgtggctcacggggccctgtctgtgcttgtcctcctctcccgtgtggctctctccagaccctggacccatcgtctctcggtggggcccggtgtcagggcccacgcctctcctccagggcagcccagagctgaggctgagcccccgaatctctatgcgcagggtgcctcggccctcttcgacatgatcgagtactacgagtcggccacccacctcaacatctccttcaacaagcacatcggcacccggggctggcaggcggccgcccacatgatgcgcaaggtgggcgcctctcggcttccaggaagaggcagctcaggctcccagcacggggaggcactttctcagggcatggcccgtaggctctgactgcatgagctcttgagtgtgggctgttgtggggatgctgggcctggccctcaggccaggagaacagggccgagaggtgtcctggcccccaggccccctggccccttctctccttgcgaggcatttcatgacctccaacttctcccttccgtaatgtcatccttctgtaatgtcatccccttggaggtggccatggtcgccatccccacgtcactcctgtgtgaaggctgggtggagggacgggacggggctatctggtaacctcccagccacacaggagttggagatcctggctgccaccagccctgcctcgctcacccacaggaccccaggctgagccttccctccccagccacagttacccccattgtaaaacaaggcgacatagccagacgacagctgtggcttcgttgctcattgagacatgggggcacaggtcctggggccagggagtgctggggcggtcctggggccagggagtgctggggcaggcctgagccagtgcctcacccctgtcctcttgcccctgcagacgagctgcctgcagtatctggacgcccgcaacacgcccctgctggaccactcggcgcccttcgtggcccgtgccctgcgcatccgcagcagcctggcagtgctgcacttggagaacgccagcctgtcggggcggcccctcatgctgctcggtgagccccaagcccgggagggtgagcaggatgtgcagcctgttggggggcaggggcctgcccagtcaccgtgccccctccccgtccccagccacggccctgaagatgaacatgaacctgcgggagctgtacctggcggacaacaagctcaacggcctgcaggactcggcccagctgggtaacctgctcaagttcaactgctccctgcagatcctggacctccggaacaaccacgtgctagactcgggtgggtgcagtggcccaccccacccacacccgtcacccagcacccactctgcccggccctgcgctaggtggtgctggggacacagacatggccaagaccaccccaacgctgtcctgctggggctcccaggaggaagacagacccgccctagacagtgacaacctagagtgggcaggactgggctggtggagcccagaggcggggtccgatcagtctgggggccagggagggcttccaggaggaggagacagctcagctgacagccgcaggatgaggcgaagtgaataattacaatctgaaaagaaagcagtgttgctgccataacagggtcagctagaggctgctttcagatgggagaggagggaagaccaccgtggggcggggcctctgggcttccatccggaggctgggagcagaaccagccttgtgagaagcctgggaaagggtccagaccgcgggagcagtgagtgcagtgggaggagctctggtgtttgatgctgggggttgagcagagaatggggagccgtcaaaggaggcgttcctgttgcatcctggaggggtggggtgggtcactgtgtccccaggtggcaggcccagaccccactctactgagcacctgccaagggccatggctgtcggcccctgggctcagctcggagggagacacagggctctgcccttgggagtttgtactccagtctagagagacaacgataagatgagtgaaatctccagcctgtcagatggtgggatctgcattggagggagacagtggtgactgtgggtgggagtgagctggctgtgaggtgaggtgggccagaggtggtcacatttgagcaaagatcagaagcatctggtggaggctgtcatccaggcacccaggcccaggggtcacagatgtgtgcccaggggtgccaggccgaggcagggctgcagggcaaggcctgggactgcggggcctccatggaggtcctaagcagagggggttgctcctaccctgcagtcccctccccaggaagcacccggaccccagacagggctctgactgccggcctcctccaggtctggcctacatctgcgagggcctcaaggagcagaggaaggggctggtgaccctggtgctgtggaacaaccagctcacgcacacaggcatggccttcctgggcatgacactggtgagtcaggctggcagggaagggaggcacctcggtccccgctgccacctcccactccagctctcagcacagttgcctctagctgacggctcctgtcctgcccatcctgcaggttcaagacgatttaaactcagccccacctgcttcctcattcagcttctgtgcctgttttccctgaggaggagcccttctttcattatctcctttttttttttgagaccgagtctcatcctgtcacccaggctggagtgcagtggcgccatctaggctcactgcagccactccagcccccgcctcctgggttcaagccattcttctgcctcagcctcccaagtagctgggactacaggtgcccgccaccccgcctagccaatttttttattttttatttttattttttttgagacggagcctcaatcgcccaggctggagtgcagtggctcgatctccgctcactgcaagccccacctcctgggttcacaccattgtcctgcctcagcctcccgagtagttggaactacaggcacccaccaccacacccagctaatttttttgtatttttttagtagagaggggatttcaccatgttagccaggatggtcgcaatctgaccttgtgatccaccctcctcggcctcccaaagtgctgggattacacgcgtgagccaccgcgcccggcctaatttttgtatttttagtacagacggggtttcaccatgttggccaggccggtcttgaactcctgacctcgagtgatcccccccacctcggcctccgaaagtattgggattatgagtgagtcaccgtgcctggttttcagtttttatgtggtgcttaaagcaagccactcaggtacagagactctcagggcgagcactcgtgtgctcaaaccccgggataagagttgccctccttgggggcttcagggcgctcaaggtccaggccctggccaggggcccaggctgtggggggtagggactgactgggtgcctggggagctgggagtggacgggggacctggcatttggggagacttcaggcacaggagggacttcaggccaggcctgcggcagggcaggacggcgccggtgttcacgcaggcgcgcgaaagaaaaggagcgcccgggcctggctctcttcccggcttctttcctgacttggcctcctgggtctcctccgccatcacggcctcctcctcaccctcacaccccctccctccagccgcacactcagagcctggagacgctgaacctgggccacaaccccatcgggaacgagggtgtgcggcacctcaagaacgggctcatcagcaaccgcagcgtgctgcgcctcgggctggcctccaccaagctcacgtgcgagggtagggtacggggccgggccagggtgcgggctggtgggctcagccgggcggccagccgggtgtggggcccgtggccagcccctgcggtgcccccccaggcgcggtggcggtggcggagttcatcgctgagagcccccgcctcctgagactggaccttcgggagaacgagatcaagacaggcgggctcatggcactgtcgttggccctcaaggtgaaccactcactgctgcgcctggacctcgaccgtgaacccaagaaagaggcggtgagcaggggacggtcctgcagccctggggcgggcggaaggccgggtggtggggccggcctgagagccctagccaggcgctcccgccacaggtgaagagcttcatcgagacgcagaaggcgctgctggccgagatccagaacggctgcaagcgcaacttggtgctggcgcgggagagggaggagaaggagcagccgccacagctgtcggcctccatgcctgagaccaccgccaccgagccccagcccgacgacgagcccgccgctggggtgcagaacggggcccccagccccgcacccagcccggactcagactcagactcggactcggatggggaggaagaggaggaagaggaaggggagagggacgagaccccctgtcctgccctggtgccccccacggactccctgggccctggggacaggagtcccccaggcagcccctccacacccaccgagcagcggatttccgtgtccagcccgggccggggccacaaggtgtttgtggtgacccgggtggagagcccgcccgagagggcagagccccctgcgtcccccacccctccctctcccccaccccctccctccccacccgcctcaccttccctaccaccagccggggccattgacacccgggacacagggtcctctgagcctcagccaccaccggagccgcctcggtcagggccaccactgcccaacggcctgaagcccgagttcgccctggcactgccccctgagccgcccccggggcctgaggtcaaggggggcagctgcggcctggagcacggtgagaggggccctagggcaggtgttgaggggccctgggtgctgtatgtgaccccaggcaagcccctgcctgttgtggacctcagtttccccctctttaaaatggttctcgcaggggccagcaaagtggggcttagttctcatctccaccctgcttcccttgggtcctgggagctcttcctggggtgggggggcatgtaaggtgtgctgccttgagcctgaccatctcagcggtctctgggcactctgcaggccctgagggtctggctggggccgggctggggacaggttgtatttgccccacccgcctgacgggggtgctggcccgtcctcccacacagaactgagctgctccaagaacgagaaggagctcgaggagctgcttctggaagccagtcaggaatccgggcaggagacactgtgacactttaggtgaggccaggcccggggcccacagcactcgggaggagctgagagagcctctggctctgacagtctctcccccaatctctcctccccaagttccctttttccggtcggtctgcgatgagctgaggccagagccatgagaatctgctcaccttccccccagccttcctgaggcccaggatgccaggggtgggggccattctggggcccccctccccccacagcaacactacaaggggtgcaggagctacagggagtggccctccgcgcgtgactcaagcacttctatttatgagcccagcactggaagactctgggggtgaatgggaggagggggagcaggaggaggaggaggtctccaaggacatcaggcgcctgttctggaggggccaggcttgccctgcggagggcaggcgtcctgggtggtggtgggatggtcccctgtggccccgggcacagggccgggcaggcagcctggtgccggagaggcggtgcgtgctggtggtggttgagatgcacagaacagccccagacagcgcaggccgggcagggtggggggatgggagcagaggatcagagctttctttttctcaagtgcaataaatctatcagggagctggggcgggagcagccggcactccgggaccctgctgtccaggccactggaggctgcgccctgagaggcactacagccctttgggggcgagtggcatgggtgtgggtgagggtgggcagagggctggggctactcctgtcggtgcaactctgttcacaccttttctaataaactggggctgggttcactttgcccaacgtctgcttcgtgcggatcctggaggtggttgctgggggtgggctgggtggaggccatcacagctcctggttacagagcatctgccagggcactggtcaggcattactgcgtcttcccccacagtcccgtctattctgcatccatgctctggtgtctcgtacggtcacctcccagccaggcgagtttacacccatcctttctgcagggagagacaggccccagatacctcctggcttcaggtctagggtctcaggatgctggatatggagtggctctgcccagtcgcccatcgctcaacaggaacagatcccagcctgtccctggcagccccaggtgttgtgcaggtgggagtatgccccgggcccagccagcactgcaggagcctggtgggcggcttgttcccctttgccagcaggggcctggggggccatgggggtgctgttgcggatttctgagaggtctgtttttccctttaggaaaggggggagcaggccgggcatggtggcccacacctgtaatcccagcactttgggaggctgaggtgggaggattgcttgaacccaggaatttgacaccagcctgggcaacatggtgaaaccccatctccatagaaaatacaaaaattagctgggtgtggtggcgtgtgcctgtagtcccagctactgaggaggctgagttgggaggatcgcttgaacccaggaggttgaggctgcagtgaggtgtgattgcaccactgcacttcagcctgggcaacagagtgagatcctgtctcaaaaaaaaaaaaaattactaaacgagcatttctgggccacccatccccttgtttcccgtgtgggaggctgacatggatggaggcgttgtggtgacatcacgagaaccacagtcgcaggctggagccctggtgtcattcagctcctgcacacaccagggagtcccctgcccccagccaccctggcctctgggaggaacaccttaggaagccactgctggtttgctgtttggtcccttgcagctgtaagtgtcctaactgctccccaggtcagccacggctaggactcttatttgggcgagggacttagggaagctacacagaacagccgccagcagcccgcagcactcttcccatccctgcacagccagcttgtccccagctctgctaatgtgcgatgtggccatgggtgaagggaagaaggggccccctcctggccactgtggatccagcccgtcttggtgaggggccggggcatgtgaggtgtttgcatcaaggtactgagagacctctgtccttcgcctggtttgggtcagcacagtgccccaacgatcttcagaggcccttggtcgatattagccgttgctcatggtctcagcctctgtggaggcagctgtgttggggtctcacccagcccgctggccgtctgcctccccaccccatgtgaggtatgctaggggagggacagggatcctcttcccagcctgtcccttgatttgctttcactaaattgagcttggagtgaggaactgggcctttcttactgttgggggttgaattgtgtctcccacaaaaaaagatgtttgtttatttatttattcatttatttattgagctggagtctcgctctgttgccaggctggagtgcagtggcgcaatctcggctcactgcaacctccgcctcccaggttcaagcaattctgctgcctcagcctcccgagtagctgggagtacaggcgtgcaccaccacgcccagctaatttttgtacttttagtagagacggggtttcaacatgttggccagaatggtctcaatctcttgacctcgtgatctgcccacctcggcctcccgaagtgctgggattacaggcgtaagccactgcgcctggccaaaaaaagatctttaaagtccttacctccagtaccccagaatgtgagctcacttagaaatagggtttttacaaaggtaatcaagttttaactcattttaatgaggtcactcgggtgggccctgctgcagtctgattggtgtccttattaaaaggggcatttgggcacagggagactgccacgtgaagacagaggatggggtgatgcctttgcaagccagggagtgcggagatggccagcaatgcaccaggagtggggagcaggcacagagagcccctccttcatctggaacttttagcctccagaagcgagagacgatacatttgtccttcaaaggcacgtggtctgttagactgtgttagagcagctctagaaaccacagccgttaccacaacaccccagcctgccgcgctcctgattttctgaagggtcccagatcgagggctggaggctgagaggatcccccttgccatcttgtcttccccttcccttcagccacccaagtgtcacccgagcttgtcacgttttggtagcctttgctgaagacgtagggggtctgtttcatgcaagatctcaatgtcctaacacaggagatgtttattgtcacatgtggatgttcagagtggcaggcagctcttcaccaagttattcctggacccaggcccctttgaagctcttagggctctgttgctccccagggcctcaaggatcccggatcaagtgggcagatgggggaagggagtggagaagggaaacctgctccctgactcattgctgggaaaggcgcacaggtcagccgtgctccttttttgttcgtgacaacggtcccgtggctttacacaggtgcaagttctcatagcagctccacgtgaagatacagtgaccaacagtttggccacagcttgtaccacgtaacagaggctgcggcttttttttttaatcagtcggagtcttgctctgtcgcccaggctggagtgcagtggcaccatcttggctccagccaccacctcccgggttcaagtgatcctcccacctcagcctcctgagtagctgggattacaggcatgcaccaccatgcccagctaatctttttgtatttttattagagacagggcttcaccatgttggccaggctgatgcagcttcttactgaggcatggggggcttcagtcctgccctcacctccagccaagtctacacgttagcatctctcacagcaccccactcctggtaacaggagtgaaaatttattttcagcttggattccaggtggtaagaaacaaacccaactgaaactggcttaagggaggctacagggatatattgaccccaaccacacatctacagaaacagacttaacggtgtcacgaggccccatccttctccctctgaggccagctctccctgactgctgggaaacagctcccaggaggtccaggcgtatcctaccagcttagtcagtccaggaatgggaaacagcacctctgcttgcccagccccagggaagatcatagagggctcccactgacctgcatgcacctgtgacaattgctgtggccagagaactccggtgctgcagccagacctggatgctatgcccagccttggaactaaagaactgtgaggtcagtgacccagtcccatggcctgagggtgtgtgcctttgcagagctctcaggttcctcgggggctgtcccctccaccagcctcagggccctggctcagaagccacaccctcagcctcatcccagggtatgttcagtgttggcccttgtggcccctgccggcacacacttggaactgggccaggcaccccagggcctgagcgtgtggctgaacatttgaccagtgaggaatcaggaactgcccagaggagtgacacccacccccagcccagggctctgcccagagggaaagtgggggagccctagtgtaacccctcctggctggctgtggcttgggccctgtatgtccccatctctgcccaacttccctgtcctcatcagggggctgatgcagtggcttcagtgtcagtgactaaccagtggccctggagtgactcgtaaggcaggtaccctgtggacagttatttgtctgggggaggttagtgccacccactccagctggctgaggtgccagcgaggtctaacccattacgttgagaatggagccaccctaggggtggagcagcttgctgaggtcaccgaggtcatcctcagaaatgccagcccctgccctactcacagaggggcaagctagggcatggggacaaggactgggattccctgaggcctgggcgctccatgttgcctgagtcaacctggcccatccacctgtcatctctgcagcctcacccaccacccccgcagcctctcctgccacagagatgccagatgaggaggccagcatggtgcagaggagtaagtgggcttagcaggatggggcaggccctgtggcaggacggggcaggcctggtccctggtcagatcaggatgcggagagcaactccgggctctcaacacctccatttattgcatgtataccctgacttcctcactggtccttctgtgcctgctctcatgctggcaccggcttgtggccgcactccttggaagctatgtccacggctctggctcaggttcacctgggggtgtgggcctcacagggctcattcggaccctgggttgcggccccagtccagccccctattctcccatctgggcagatggaggaacccttgcctcctgctgcccgccaagtcctccatttaaggcccacctgggctggattgccctggacggaagagcgcacaggccaccggccatagcttgcccctgtgggccaagtccccagtgtggtggccttcgccggcttgccctgaggcacggcccgacgggggcgccctggaggcgctgttggcccggtgggcagcgtggggggtatcgcgggtaggggacttgggcgggctgggcggcttgagcgcgctgacggctcggatgagacccatgcgccggcggatggagtggtccaggttgaccgtgcagcgcagcaggctctgcgcctcggccacggtgaaggggaagtcggcgcccaggaagcgctcgaagagctcggggtcgccgtccaggtcgagcacgttctgcaacgccttggtcatggtgtgcagctcgcggctgttgtcgcggaaaacgtcccagaggcgcgcgcggccctcgggcgcgcccccggtctgctgccggtcctccaggcactgcagcgcccagctcaggcggcacggccactggttggcgagcaccacccacgccaccgcctggcgcggcgtggggcccccaaagtccccctgctgctgctgctgctgcagcaggcgcacggtgatgggcacggtgttgacgatgcgccgcatggacaccacgttgtcgggcacgtactcgtagaggcagtcgcgctcgtcgtgaaggcagaagagcgcctcctggattcgccgcgccgcctcgtcgtcgatgcggccctgcccgcgctccgtccccgcctgcgcctgcaccgccagcagctgcgcgctctcgcccccggcgtcccccggcagccacggcttgcgcgtcatctcgcggtacaacaggtcgtcgcggctctgcaccgcatcgtgcaggaactgcagcttggtgcggcggcccataatgggcacagagaagggcagcgtgacagtgcggttgaggaagaggtagccgttatcggccgtgcccttcatgttgcccgcgctctctaggcacgcggccaggatgctggggtccacgaccaggatgaagatgaagggcgcgtggctgtcggacagcagcgtgttgatggcgttgagcacgcccaccacgcgctccgggtagcacgtgtccagcccggtgacctccagcaccacgcgcagcctgcgccgctggtagatctccaggaagcacaggaagtcggtgagcagctccacctccttcttcacctcgcacatgaaacccagctggctgccgaacttttcacgcgacaccagccgctcgatcttcttgcgctggcttacgaacaggtgcttgcccaccgagtacacggccatgagcagccccgagcccgacagtgtggtggccgcgccgccaaacaccttgagcaggctgccgctcgggctgccgtggcccagcgcgtggccgcccagtgacaagtagagcagccccacacccaggcccagcgccgccagcagcgccagcagccccaggcacacgcggcgccgacaatgccactcgctctggcagcagtcctgcctggtggccggcttgttgcccagcaccgagtacacgctgaagggcagtgcgccatagtggcggcggatgccctcgcacaacgtggtcaccaggccggcccacagcttgtcggtgcccgcgtactgccaggcgctaaagcggatgaaaaggaactgcacgttcctgcgccgcaggtgcacctcggtgatgatgggctgcaggaacaccaggtaccacagtagctgcgggacgccccagccgctcacggcacgcggccgccactgcacgtgctgcagctcctcgctctcgcgctgcgcggcctcctgctgcatcagcgctgcgggaagggagcccgggagccgcgtgagccgcagacccgccggggtgggcggggcctagtacgggcagggcggagcgctcctggagaggcgaggggcgcccagcagaggcgaggggctggaagcgagccgcggccgctccttaaagagctggaagccggtgcagaagcgggggcgtggagaggcctggagccgggcttggaccggaagcggtctgaaggccaggctgtggggtcgggatgggcagaggtagagccggcagaggagagatgggaggaggcaaaaagagatacgaggaagagccagggatgggcaagaggctggaggcggagcgagggtgtggagggcaccgggaaggttctgagagtggggcaggggacaagtggtcggtgtaagggatgaatgaatgagatgctgaggaggagctatgctaggcagcaggatacaccctcggtcttatcttgttgacttaactgctcctcctgcaggaagccctccctgatccccaggctgggtcgggggccctcagccattcctactctgggtcatcactgtctgaggacaagtctctctcccctgctggactgtgagccggaagggcagggtcctgcttgtcttggtcaccgtgtcccctgggcaccagaaggtgcttagggaatgcctgaacaatagatcatgagaaatctgaggtcacagagtgaatgagcgggagtgtctacagcacccagcaggaggagtagggactctctgttctttatatcctcttctcctcccgggaccctgtgacaacacaggacaggacagtgagtgctcaatggacagtcagtacaggaaggaaaggctattgggcctgcaccagggctgggcacacgtaggaggaacgtcagtcccagcccctctggccccacgtggggctgaggtctgagctccagcagggcttgatccagatcaaagctgctggggaggccagtcgcggtgagtcacgcctgtaatctcagcactttttgggaggccgaggtgggcggatcacatgaggtcaggagttcaagaccagcctggccaacacggtgaaaccccatcgctactaaaaatacaaaaattagccgggcttggtggtgggcacctgtagtcccagctacttgggaggctgaggcaggagaatcgcttgaacctgggaggtggaggctgcactgagttgagactgcgccactgcagtacagcctgggcgacagagtgagactccatttaaaaaaaaaaaaaaaaaaaaggccaggtgcagtggctcatgtgtaatcccagcactttgggaggctgaggcggatcacatgaggtcaagagatcgagaccatctggccaacatggtaaaaccccgtctactaaaaatacaaaaaattagctgggcgtggtggtgagcgcctgtaatcccagctacttgggaggctgaggcaggagagtcacttgaacccgggaggcggaggttgcagtgagccaagatcgcaccattgcactccagcctggagacagagcaagattccgtctcaaaaaaaaaaagctgctggggaacctggcgggttgcagttcatgtcttcagttggcatctatgtatcaggtactttgtgaccaccaagccttaagaggtgggtctgggtggcacagaggccagtaggggcttggcaggagcctgcagcctcaataaagagcctgggctttctgcctcaggtgctggggagcatggaaggcaccaagcacaggagggacagggtcagatctgtccttcagaaagagtccttggagtggatttggtggcagaagcagggaagggtaaaacttgggggcagccaggaggccagagaagcagagcccggggtagaggcatgggcttggggagggcctgggctggggcaggctggccacaggggtggggggatctgggggaagcctggagctgggcggggaccagaggccctgtttctcatcctccccccaacaaacacacacagctcctcacccgtgatcttgtccagcatcatgtgcaggcggcagccgaaaggggcatagaaacccacggtcacagggaccggcacgtggcagagtgtcttggccaggcagctgcagtagacgtcatcctctgtcaggatgtctggtggttgggagtggggacactgagtcaggaccactggccaggcaccaccctcctcccatctgccctccatggcccccactatcagccccttcctggcaccctgtgcaaaggggactcaggtcaaaccctgcagtggaggtttctgtggccatcagtggccctcacctccagggcgagctgtgcccctttgggtcccaccaggctgaggctgggaggctggaatccccccagccacacaccagaggctgaggctgcgggaagtcagctttcctggccctaggtcaccaggcttgcttggtcactagcccgtgattcccccggggaaaatcccaaaggcctttatttgggatacgaggccctcagatgccaagacaccactttccaccatcagcaggactccaggccactcctgcctgctctgctggcccggccagagcatggagaggccctgggccgcaggctcctcccaccgtcctgtccatcatgctggcaagtcactaatcccacctgagcccagggttgggagagagatgaccagactggagctccagtcccagccccaccgcctttgtctgcagaccccagggagagccacctctgagaggctcatttccctctgaagagtggggcagcagagacaccagggagcaggaatgccaaagggtctggccagcgccgggcccttggtcaatgtcatggtctccagtggccatttagggccctggggaccaggcactggcactacggcatccactctgcagagggcaccctgtcccccagtgagggttgcttcttggacctggaaatggggtatcaaaaaggtagggttcagtcttggggggacacatggggccagctttgtggtgcacagtgggggtaacacagccactttcagagaggcctggtgggctgtaggaaacgggccacacctggcggcagagccaggaggccaggaagcagactcaggagtagttctactgaggtgtgggtaggcgggtctaattccagctctgccagatcactgggtggccccacctcatccaccctctacttccctgtgtgtgaaatagacatcgtagccctgaggctccggtgacagggctgtgcccgacctaaagtccctgttgctctactttcaatccagacctggaaacccagccgtctccacctctgctgccgccaccccggcaaggctgccgcacctctcgcctggatttttgcaatctcctgctccctcggccacctgcttccgtcctcctcccatagcccattctcctggagatcctgtcagctcacatccatcctcggctcctgcctcctttgggcaaaagccgaagtactggctccttgctggcccgggaacatgcctcctcagggtctctgctcaaacgctgccttaatgaggcccagcctgacaacccgatttaaatctgcaaaccctgacatcccccatctcctgtccctgctttatttttacctagtgtggttgttaccgagtggcatacttttcgaggcaaggtcttgctctgtcacccaggctggagtgcagcggcacaattataagtcactgcagcctcgaactctggggctcaagggatcctccttcttcagcctcccatgtggctgggaccacaggcgtgcatcactatgctgggctaattttttattttatcttttgtagatacagggcataactatgctgcccaggctggtctggaactcctggcctcaagcgatcctcctgcctcag[135 bp omitted]acctctacctcccggtttcaagtgattctcgtgcctcagcctcctgagtaactgggattacacgcgccagccaccacacctggctaatgtttgtacttttagtagagatagggttgtaccatgttggccaggctggtctcaaacccctgacctcaggtgatccaccagcttcagcctcccaaagtgctgggattacaggcatgagccactgcacctggcctcccagccacttttaaatttccatgtttcctgtacctgcccccggctgcaatgcaatgtgagccccatgaagacaagagatgtctgttgatcccactccccactgtgcccctagaacagggtctggcacgctcagggtgctggatacctagtcatggagtgaatgagggagggagagagcaagcaagtgggtcttcccattgctgacctttgctctccgttccccaggctactccctagctctgtcttccccaacgccagagccagccaacaacccagggctcaccatccctgccccatgtaccctgtaccctgctgagccagaggagggagctgagaagagaccagagcagagccagggtgtcggcagagggaaagggggaaggagagggaggccttcactgcctggcgcaggatggaggcacggggcaggcctggcctggaagccttggaccccaacaggcaaagctgaggcagccagcctgagccccatggccagggacgcacccctcctagatagggaacagggtgtggatgaagagggcaggtgcaagatgctaggcagggagcaaggagagcaggtgggaagtgaggcggcaggagtggggacagggcccccaagaaggccagggtgagcaccggagctgtaggcagtgaaggagccacaggccgctggggcgggcaggggccgggcatcagtgggctcgctgggcttcaggaggacgccagccgcggagggtagagctgggccactcctggccatggctggtgccgtggtgggtaaggtgggcgcctgaggggcgctggcaggttccttggggacagtggaggttgcaggcagccccttctgggcttcgtgaatggggcagagccgctgccgcagggggctgggaggtgagggctgggactggggctgccgctgctgctgcaggacggagggcaggaggccccggcgccagccactgccacccacttggtggctgtggtaggccagctgccagtgtgattggggggaaggccgacagggcccatgggctcggagggccgctgagtcctggcgccactgatgacagcatcctggaaggaaggaagtgggggtgactgggcctgtgtccccgacccccgggggcaccggcacaagccagaccaagtcttcaggtagaacctgggggccagagtattcttgggagccccagaaacccctcaaaaagtaagattatgtgcgggggaggtatgggcaggggagggacccagggtctgtgctgtcccatggcgggggagcagggaaggtgcaggcttggacttcagctgggggcagagagaggacgcctgaggttggggcttcaatggaggctggtgcctgccacagcagattcctggatccctggggggtgccgccagtgcaggggtcagggaaactgagaagatccattgggagctggccctggctggcccagggaggccggagtgatgggtggtggcgtggagaggggtaggccagggatttgggtggggggtggaccttgtccccagctcgggccagggtggcaggaagggtggtgacctgggaagctccagccctcgccctagccctgaggaggctgaatcagccccagtgggagggcactgccccctccccaccctgaacaagatcacctgtggtcaccaccagaaactgggcccagcctcatccagacatgttcagtgggggggctccctctcctacccctcactcccagcacactgctcccctccaggctggaggccatccacacaggcctcagggtttggaaacggggcagggcaggccaggcggcccctgcttccaactccagcccaggctcctatctttgggcccgcaggccctgtggtccgggtcctgggtcccaggccctgctgctacacagatgcctctgggtggagtgcaagtggcttttctctcctggggatgacagctccccttctgttcctccattcactctggcttcctcacaggcctctgtcggccatcacccgcccccaaactgaacccgtaccttttcggtgccccaactctgggtcccagaagtagtgcccgttggggctctgggcatccttggcgaagtggactttgtaatgtttgtgcatggcagccgggcagctgggtgctgggggcctgctcctgaggcaggagggagcacacaggcttggcgtagcctctggggcacgaacagcagagagctgaggtcagggtccctgccctgcccgacagcttggacaggggaaaggccaagtcccagatgctgggttcctaggtcacttgggagaagggggtagaggtggccttcagggtacagtgaggggcaggataaggagggatggccagaggagggaacggagaaccgctggggttggctaggggttaatttgaggctgggtgttgggaagctcctgggagtttccaagaggctaggacactggggagtgctgagcagacatgggctggggaaatagggggtccggtgtggtggctgagtgaccaaggggtcattaaggtgtgggcgctgtgggaggctggcacgctttggaaggacatggagctagtgaggtgagctggagagcagatgagaagcagggtgagtgaaaatcagagctgggtacctgtgggcattgaatgatacggtggagggggaattgtgagggagcaatgaaatcgcggtggtccaatttggggagaggctcagcaaactcgggcaagatgggtgtaccgcgtttccaatgtgaagagccgaaagcaggacagggaaggatgctgtgtgggggacagggatagggaaaggctgaggggcagaggaaactggggtgctgagagttggtagcctgcccaccactccccacccccagtcccagtcccactcgtacctgacggtggcctcacggccccagctgcctgccccacgagcagctgccacaccagcccggactgtcagcgcaggcccatccagatggaggcctcagcccagtgcccgcctgaccggtttgcctgcctgtccccgccccttccccagcgcctgcctgtcccagtgctctctgctctcgaggactgggactccgactggactcagtcttgtgtccccatccctggtaaggaacggagatgcatcccgcagcactgcctcaatctccttaaggcagccacaggcccaggcacttctgctggtgtgggggggacagggagctgggatgccagctcctccgtggcccaggtatgtgaccttgggcaggtgacttcactctccgagccatggcttcctcattgctgagtgggcacctgcctctcgtggctgtcgcgagggaggcactgggtgggagtcccctcagctcagggcctggcgcacctgacccggggctgtgctgacccatttacctggcgctgttctaaatggatgtccataggacaagggcaacagcacacacatcaaggcttgctacaccatagccccgtcttcctctccaccacccagggggccaggtgtgatgcccgcttcacagatgaggacactgaggcccagagaagtgaagtcctcggccccagggcacacagaggcagggcggggatttggaagcagtcagtggttgctactcccaggctcgccaaggctctgtctcctgccctcggggccagcactcagtgactgcctccccacagatgccctctgaggggtgagggccggggtaaggctgggcaggagatgccctgaaggcccctcggctctctggggccccggctccctgtggctgctggcgtaacggggtcaacagttgcttccctgacagacggggtgctccgatggggatgggggaggcagccccagaacagtgcccaggacaagataaagggaacccacccagccctgagttctgcccaggtgaccaaacactgctccctacggccagagccagggcccttcctgcgacctgggaccccgtctcctcccccacccttcaagccggttgctctgggaaggttcctccctggcccaccagggaggcggggctggcatctgagcgtgggcatctgcagtgggcctccgtgccaaccccccacacccccggcccgatcatgaagcgtggcccaatgtaaatgagccgtctccgcaggacgagattgccccgggctgggagcacagtggccaggaggctgctggacactagggggagcaggcgtttggggagtgggccaggcgggcagcactgcagaggcagacacaggacacagctacactcagccaggtggaataggaaggggtgacccaggcagggcctgacggggtgactggaccccactctacaggggaggttctttagcaaggggcccctttctcatcccatttggggttcacccccagccttggtgggcagctctgagcctggggcacttacccatgtcaggcagcgggcggcgaagcccaggagtccccagatgctacagatgcgagcggggtgggagggggcagcataagggccactctgcccagggacgggcagcaggagtgcgtaggggccgcgtgtgtccatgggggtgtctggcctccccctaccccatgcatccccagccctggcagccccagcccgacctggcctacactccgggcactcccagccctgctccccaggaagacgctccgttctgtgcacatcgccgggcagagggcagccccagacttgttgacttggcagaggtgccagtaaggccgcccatgccggaggccagcatccctctgccaggagcacggggagggagggagtggagggggacgtggcaggggagggaaggtctgaggggcatgggagccagagagggtacccactcccctgcaggacctgtgacagtcggtccacagatcctcccccactgctctgagtcagattccacacacacagcctttattgagcagctactgggcagtgacgctgccgaggcgggaatcccaccacagtcctgaccgcagctgggacccctttgcctcctctgacacccccacctcaatttgatacccacttcctgagcaaatgtgacccctagggcctgggattcccaagaccaccccgaaatgcagcggccccaccgtctcctgaggccggtgaggccaggggcagcagtgcggctcagcaggtgcgaggcaggcttaggatttcggaatcaccacctggaacttacctggaagagaaggcctggcttaggcttgaggatgggatgggggaggcagagggcacctggacggctcttaggcgctcacccccgtcctgcactgacaccccagtggctaggttgggctgtttcctcccgcccacggggccgcatccctgagctgtgtgagtaaccaggagcatgagggccacggatgtggccccagggaagcgcccggcacgggcttctgtggtatgcattgctcggtcctaccccacgggggccccgggggcccccatgagtgggcctggggaaccggcagaggcaaaataactgaaggtgggggaggtggtggggcaggctgtccccaggcaggaatggggctccagcttgtctgacagaggacacccagtcaggcaggctgcaagttccctggagcctgccgtcgcccccatcgaaggatcagtgaggataacttctattgcgtccacctcggctcccatgctgggaaacgatgttcaaaaccgccagacagttctctctgcagggctggcgacgtcacggagccaggggcacagatgggcctgcaccagccgtgtggctgagcaggtgacttaaaactgggcctgcctcccaggcacacacacaggagtggggctggaactctgaagcccccagcaactcaagggatgagaagaatccccccaccccccatgactcacagacgggcagggctgccacggaggcggtgaccacgctctcaatgcccagggtatagagggcgccgcgcaggaggccgcaggtgaaggccaggaactgaggagggaacacagaccagcatgggaagagaggggaggccagcacccgaggtctggggcaccccttaggcctggggaaaggcctgatgtgggatggggctgggtaaacaggaggaagggaggtgtggacaaggccccagctccccccataccttgggtgcttcctccagatactgcaggccagaggccatcgggaggaggagggggaagctgttgtcttgcaggacgtaggtcccctgggggagaggagaggctggtgggtggggtcggggcctgtacatttgaagcgcagggagggtaagcaggaacccaggtcttagattgggctgaggttgggaaggcccccttcctgagaaccactggagtcacagccttggcctccagtgctctggtagggcccagggcttccaaacttggagtgggtgcctgtgccctggggagtgtgggtcctgccctcgcctcccagggttgtgcagaaaagctggggacccggcccaggaagatgcagaagggcaggtacagcctgggtgtcactgggggactagaccagcttgggacaagcagcatcacactgggggtagggcaggcagccaccaggggctttctgcccatgcatggctcactcctggtaggctggagaagttccggaaacaccccctatgccccagcgcagcctcctggcttcccttagaggatcagacagagcaagagctgcggccgcctgtgggaaagctctgggcgggtcccggcagccgctgctctggcgccgggggattcccctcccactctcttggtcttgccctcaggaggaagctggacgggcaggccggggtgctcccacctggtgattggtgcgcaggctgtccatctgcttctggaacaccgccacccacaggtctttgcacaagaacttgaggacatccagctcctccctgaaggccagcgtctcccggggcagcctggtggggcagtaccaagctgaggccgtggggccaggccaggaagagggaggaagacaggcccgactcctgcatggagcaatgcaaccctccccgcccggggcctgcccagccctgccagccaggctgggggagagcaggaggggccgcgctcacctctcgcctagagcctggcccacacggaaccccataccctccaggaccgacaggctcatcttctgtccctagaaggccaggggagagatgctcaggggcccttagccaccacgaacccggggccacccagggggggacctgccaggggacccaaagaccaacttgctggtgctcgtcagttcaggggtgagcagggaggggctctggcacagcccggccagggcaggggcaggcctctagggtgctggggctccctcacccacctctgcagaccttgcaggctctctggatccccagatcatcagcccccaagaaccagctcccccttccctcaggaacaatgggggtcttccccaggctcccttcctcctccatgacttttcctgataacccccatgacaggctgcacgtgctttcagcgcgaaccctcacaatgccctgggaagtgggcgctgcgactccaccaagatgctccaggtgacctgcccaagggctggaggctgggccacaggaaagggggctgtggaagtcaaccatgatcatcatgccttataatattggccaagatccctggggaacacgtggaagctcgggacaggcagatcttcgtttgggtgctcgaaaaggacagtggctgccatgtagtgtctggagggtaggccagggtccatacaggaggggactgtgctggcagaggcaggccccaggtaggagggctgcactcggtgtctgtccacgtgcctgtgtgtgtggagggcatggctggaggagaggagatgctcatggatttttttttttttaagagatggagtctagcttcattgcccaggctggaatgcagtggcccaatctctgactcactgcaacctccgcctcccgggttctagcaattctcctgcctcagcctccagagtagctgggactacagggatacgccaccacaccctactaattttttgtatttcattagagacagggtttcactgtgttgcc[134 bp omitted]tagagtgcagtggtgcaatgctggctcactgcaacctccgcctcccgggttcaaacaattctcctgcctcagcctcccgagtagctgggattacaggcctgtgtgccaccacacccggctaatttttgtatttttggtagagatggggtttcaccatgttggccaggctggtctcaaactcctagcctcaagtgatccgcccgccttggcctcccaaagtgctgggattacaggcaaaagccactgcacctggccatggatctttttttttttttttttcattcgggtgttttgctgcaagcagaggaagggaggaggcccagactggggggcaccagaaatcccaggacggctggggcgtgaggcgccaggtttttcagagaaagcctggcagagcagaagtgggggaacagaggcggcaggtgtgcagccctgagctgaaggaagctcaccctcccgctggctgctctcaggagcctgcagtcaccaggcctgagccctgcagccctccctctcctgcccttgacccccaccttcccttgggaatggcagctaccgcctcctccctccagggctgcaccatcagcgcagccatccgaatggggatgcgaattctctgcttggctccagccctggagcgggtctcccagcctggagagcgtgtccgaggaaggcttcttgcagcctgcgggcccagctgcctccatccctccctcaccctctcctctgccccctgaggacattcgctcagacttctgagcctttgtaccgacttccttcccttcctccctcccagcttgcgtccccagccctgcccactgcacactgtccctggatgaggacacagctctgtgaaggtggggacccaggctgaccaattcacatccggccttcagcagccaacacagagcttggcatgtgggtggtgcttaacagactggctgatgagacaacgtgcatcaacaaaggacaccgtaagtccttacctaatgctgtcaacaggctcttggaaactatggctttaagcaaaatgacatatgatgaaaccaatttcacgcaggttaattaacataaacaagagtgaagttccaatgccatatttctggtacaaacacatcaccaaacttctaaataaggatgaaaacacttgaaatattaaacactgaaataaatgtgagctatacatacgtttaagaaagattaggccgggcgcagtggctcactcctgtaattccagcactttgggaggtcggagtttcgctcttgttgcccaggctggagtgcaacggcgcgatctcagctcaccacaacctctgcctcccgggttcaagtgaatctcctgcctcagcctccccagtagctgggattacaggcatgagccaccacgcccggttaattttgtatttttagtagagacagggtttctt[135 bp omitted]tggcgaaaccccttctctacaaaaaatacaaaagttagccaggtgtggtggcatgcacccgtgtcccagctacttgggaagctgaggcaggaggatcatctgagcccaggaggtcgctactgcagtgagc[140 bp omitted]tccgcctcccgggttcacgccattctcctgcctcagcctcctgagtagctggcactataggcacccgccaccacgcccagctaatttttttgtatttttagcagggacggggtttcaccatgttagccaggatggtcttgatctcctgacctcgtgattcacccacctcggcctcccaaagtgctgggattataggcgtgagccaccgcgcccggccctgaccctgtcttaaaaaataaataaaaaacaaaaaaccagtaagacatttactcgcttcctccagctcagggtcctgggtggccagagcccgtcctggcagggccaaaagcaggaatggaccctggacagaacgccatcccatcacagggcgcacacgggcccacactcactcacactgggcccacggagacccgggagctcacccagcggacacatcccaaggatgcacaaggaaaggagagcccagaggaacttgcaccagcacagggagaacccacaaccaccacccagacaatggtcccgggaatcattattttttcctcatcaatgtcacaacaaaatgttattccaggaccggcatactgtgtggcaggcgttttctacagccttcttgttttacctttccagcctcacagaaggctgtaattccaggtggaaacaggggctctgaggttaagaagaacccatccaaggcaccctcagcacgggactgtctttcacaccccagcaggtccagataggagggtgggtggggtgacagccatggctgttgagggcctcacggaggtgaggagcgctgggaatggcgggggggcctgagctgaggtcgcccatatctgaagccaaggtggcccttcctctgcctggccccttgccaggcctcgccctcatgggtgacaacgacacggcttcctgttgcactgtctccctctggtgtcaccatctgctttcctccagtgtcctcaggcacagcagggccggccacacagcagaggctcatggaaggggccgatgactgcaggagacgggcaggtgtgtgtgagagacagagtgggaagagacccctgcccgtgggtccttcatggcagcactaccagcggcgcaggtgcagagccaccgcctgggtccagatccgccccagcacttaccagtgtgggacctgggccaatggctgaatacctgtgcctcagtttcctcatgtaaaaaagagggtcattttgtttgtttttgagatagggtctcattctgtcacccaggctggagtgcaatggcacgatcttggctcactgcagcctctacctcctgggttcaggtgatcctcctacctctgcctcccaagtagctgggactacaggtgtgagccactgcgtccagcccaaaggaggggaatattaatggcagctacctccaggatcctcacaaggagtaagggttggtaaaggcaacctgagtacttcaaggcagttccgggagccttacttattgcattcacagcctccacatctgtcaaacaaggagacggccccagccaatgagggatgaagcccttggctggaggagaaccccaggaaggaagggggtctgttctgtgggctcctgtagccagcacctagaacagcccgggcgagagctcgctgcctggtagctgcggctcccgtgtcacctcctcccacagcgaagctcctggaggcagggcccaggctgcactctgagggaacacgtctgtgtccacagcaaagctcccagaggcagggccaggctgcactctggtggaacacgtctgtgtccccactcgctaagggctcctttatgtccctccctcattcatgccacagacatttcctagtgtcctccaggagctcacctaccttgcctggcagggttgacaggtgcccaaatgatgccaactgacaatctgggaagggctgggagactgagtgcaaggggcccgggcagtgcagtgcagagcctgccctccaggagggggccggaggtggcaggtattccaagcaaagggcatgtgccaaggcaggggtgagaggcggggaagggaaggggccctcagagtgggctgcagagggggcattttcccctgcaggcaagtgcagccaacctgagggtcaacgcaggccacgttgcctgaatgccagccacagtgggccacagactcagtccctgccctgctggagctggcgtttcacccggggaatgggcaaaggtgcaatggccggcttcactatgctcacagcgactgccaagagggaggcaggtgtgctgcgagggtgcactcccacccctaggaagcaccccgactgtgctgagcctgagggaagagggggagttcaacagcaggagtgggctgtgaaggcacaccaggcccaggtcacagccaggacggcagcccccggaggggtgagctgggggagagagtcagcagggtccttcagccaggccaggagcgtggagtctgaaggggttccagcaagttcagcttttcccttcatgaacttcacactgcctgggtttgaatctcggccccgccactcactggctctgtgaccttgggcagattagccaaccatcccgtgcctcagtttccccacatgtgccatggggctaatggcagtacctgctcacagtggtggtgtgactggcaggtggcaacagctggatacacggctgtgtgactgctggccccactgtacccagccctggacaggggccattcagatcctggctgaactgaaaagggctgtggggaatcacagcaaaagggaggggccgaggaggagcaggaggcagggaagaaagggcggaggaggaagggagaagcctccacccacctcatcacagcgagacctggtggtgtccatgcccatgtcactgcaaaagctcttcagaggttaggggtttatctttcttaaaaacagaaggggctgggcgcgggggctcttgcctgtaatcccagcactttgggaagccaaggcgggaggatcacttgaggttaggagtttgagaccagcctggccaacatggcaaaaccctgtctctactgaaaatacaaaaattagccgggcgtggtggcgcacgcctataatcccagctattcaggaggctgagccaccaggatcgcttgaacccgggaggcagaggtttcagtgagctgagatcacaccaacacattccagcctgggtgacagagcgagactcagtcacaaaacaaaacaaaacaaaacaaaacaaaacaaaacagaagggctggccagacagagactctcccattcatatgaatctgccagagcccagcccagagccggtgcatttctggggctccccacgcctgcctctgctgagtttacacacagaccggatgaaaggaaaggtggaagggaagtcttatcagtgtcggtgctaatgacatccaccacacaggaaggatcaatcagacacaaagcagagttcctggaaatgaacaaatatggtggccaaaatcaacactttttaacaagggaactgaataacagagaaacctgtaagacagataacacctcccagaagaaaaacaggagggaggaaaaaatgagagaaaagctacaggatgcttggaagagatgcaggaagtctaatattccctgtggtgcctacaggacatacagggaacgatgcaggagaagaaatcatcagagagatcacaggagaaaaatgtcctgagctaaaggaagattcacacgtccagactgaagccaaggggttgagctccaaggaggatgaacggaaaaagcaaaccaaagcccctttagacacttgggagctcctggtctcagacaatgggtgacagcgccttagctctttactacatgcactcaggggaatcctctctttgcccaaaggcttcccttgtcttcaaagcctctgaggtagaaaagccacggctgcttcctccaagggcttctcctccttagagaacaaaggccttcctggcccctctggccggtcctccagttcacaacctgtgacagcccaggagaatggccacaaataaccaccgtaccaggcaggataggaggtcacaaaagccctacacactggctgtggctcctgggcacctgtgctgtggggacagagatgaaggagccaccatccctgtcctcaaggagctctgaagctggtgggaaaggcggcctgtgctacccagaagccctggggccagaagcctgagttctaattttgcctttaagagaacattctgccctgaactgggagggaggcgggtgggggccatgtgctccaccccttcctgtctcttgtgtctgccctacccctcgattgttctctaggcacctgctagctcctgggcagaggctgaccctgttcaacgcccacctgctgagccactctgtgccaggcccaggggtgtggtggggaacccagggaaggagcagccctggttaagaaaagcacacagacagaagtgctggcacacagatgggtgagtgaggggtgggtgcgagaagcctgcaggacttccctgctgttgccctcaactctcctccctggtccagcaaggcatcctgagcaagtccagatcctgcctctgcccactcagaactccccatcctgtcccctggcccagcccggaaggttgagcccaccacagcctctgccttaagctcctgcaacagcggggcccttcccaggccaatctccatccagtccattcctgtggccagggagacatttctagaatgtaaatctgagccaggcgcacctcagtttaaacccggctatggctcccactgccttcgggatggagccccagttcccaggagggcctcgctggagctcccagccacagatgctcaggacggtgttccgggcagggacctatctgacagccgctccgcccgccccacaccctcctcagataaggggctgcccaagtgcactctcggggtgtggtggatggaggcctggcgcagcagggctattctcggggcgcctcgggcctggtctcagacaatgggtgacagcgccttagctctttactacatgcactcaggggaatcctctctttgcccaaaggcttcccttgtcttcaaagcctctgaggtagaaaagccacggctgcttcctccaagggcttctcctccttagagaacaaaggccttcctggcccctctggccggtcctccagttcacaacctgtgacagcccaggagaatggccacaaataaccaccgtaccaggcaggataggaggtcacaaaagccctacacactggctgtggctcctgggcacctgtgctgtggggacagagatgaaggagccaccatccctgtcctcaaggagctctgaagctggtgggaaaggcggcctgcgctacccagaagccctggggccagaagcctgagttctaattttgcctttgagtcttgctgaaccacctcgaaatcccttcctctaccaagcacagggtccctcctctgtgaatcgggagggctgtcctgaggactaaatgcagtcaacactgtgcaagtactgcacagacgccctcaggaaacgggaggcctgtctggttcagaggaacccttttgggccaaagagaaggaatggagagaggaggtggggccaataaagagaaaggactgaggaagccgtttctcatgacaggccccctgaaaaacggggctccccaggaggaaggagtgaggggaaacgatgcagttctcacccctagctgcagcgagagccacctgggagctttctgaggcctgacactcaggcctcaccccaaccgggttcgtcagagtctctggtgtgggactccagcatcggaatgtagtggcagctgggtagggaacccctgcccaaggtcccaggcacattcgtgtgctctgaaaggctggtggtgagcagagctgagtaagccagtttcccacactcgcttgaccacagaaacccattaaaatccttcccagggcaaatgctgggaaatgcaagtgagagtttacagcacaggctttggaagtgggaggcctggtcgcgctcctgactctgccacttgagagcaaggaactccgtccatcaaagcctccgccgcctcatctgtaaatcggggaggaccatgccaacctctctgggtcatcagaagatcaaatgaaatcaagagtgagaagccatgagtgcacacaggaagcactcatatgaggggagggagggaagagctagcactgctcataagccaaatgaatcccagtccccacccatccccacctgccacggcacaggctctgcattcacctcctcaacacgtccacactgaggacccactacgagccaggacatccagtggtcatcaatacacacccaggcccatcccgcacaaagtacactccggctgggggagacgcatgtgaattaaaggatcatacagatacacaattcagacgcatcctggcagggcgtgctggctcacacctgtaatcccaggtgtgagtttttgggaggctgaggccagaggatcgcttgggcccaggagttcaaggtcagcctgggcaacattgtgaaaacctatctctacaaaaaatttaaaaattagcagggtatggttgtgtgcacctgtactcctagctactcaggaggctgaggtgggaggatcacttgagcccaggagtgtgaggctacagtgaactatgatcatgctactgcactcc[224 bp omitted]aggccaaggcaggcagatcacaaggtcaggagatcgagaccatcatggctaacacagtgaaactctgtctctactaaaaatacaaaaaattagccgggcgtg[346 bp omitted]agcctaccaagaaaaaagtgcgagagggagaccaggagaatgtataaaggagatccaaatttgactgggggctcagggaaggcatccctgaggaagggattgttacgctaagatctgaaggattaatagttgttagcatggtgaagatgtgacaggtggaatgggctgggagaagggagcaggctcatttcacaggagagcggaaagcactggaccagggcagaggaggggccacgtgagaaaggtatttagactgactgggcagagcctgggggagggctgcaggtgagggagacaaggcaggtgttgggactccagggtttctcgtttgaaagccaggaaggatatggagtgttgggacattattacccacccccaggctgatgcatactccctgggccatgctgtatcttcctcatagcagttacacaatgtaccagacactttactcatttacttgtctgtctcctccaatgatgacaaagctccaagagtccaaaaatttttgatggttcactgagtaatccccatgtttttttagagacagggtctcactctatcacccaggctggagtgcagtggcatgatcatagctcactgcagccttgaactcctgggcccaggcaatcctcccacctcagcctcccgagttcttggtagtataggcatgtgtcatcacgcccagctaattttaaaaatttcttggccaggcacagtggctcacacctgtaatcccagcactttggaagcccgaggcgggcagatcacgaggtcagatcaaaaccatcctggctaacatggtgaaaccccatctctactaaaaatacaaaaaaaaaaaacaaaattagccgggtgtggtggcaggcacctgtagtcccaactactcaggaggctgcgg[132 bp omitted]agaggtgaggtcttgctatgttgcccaggctagtcttgaacggtgggcctcaagtgatcctcccacctctgcttcctgagtacctgggattacaggtgcaagtcgccacatctggctaaatgcatttttgatttatgatgttttaaacttatgacaggtttgtatctgtatatcgagatggtaacaagcaacatcctccct[164 bp omitted]tactaaaaaaaaaaaaaaattggccgggtgcagtggctcacgcctgtaatcctagcactttgggaggccaagatgggcagatcacgaggtcagaagatggagaccatcctggctaacagtgaaaacccgtctctactaaaaaaaataataataatacaaaaaattagccaggtgtggtggcgccagcagcgcttgtggtcccagctacttgggaggctgagaagtgggatgatcgcttgagcccaggaggtcgaggcagcagtgagccatgactgcatcactgcactccagccagcctgggcgaccgagcaggatgcgcgtgcgcgcacacacacacacacacacacacacacagtcccgggccagtcacggtagttcacgcctgtaatcctagcactttgggaggcccaggcgggagaatcacttgagcctaggggttcaagaccagcctaggcaacatggcaaaaccccattatctcttttttttttttcctgagacaagtctcgctctgtcgcctaggctggagtgcaatggcacaatcttggctcactgcaacctccgcctcccaggttcaagccattctcctgtctcagcctcccgagtagctgggattacaggtacccgccatcatgctcggctaatttttgtagacacggggtttcaccatggccaggctggtcttgaactcctgacctcaggtgatccgacggcctcggcctcccaaagtgctgggagctacagcgcccagccggcatatttcattttattatttgactcccctagtgaaatgtaagcttcacaaggaagggattctgtcttagaacggtgcctggaatacaacagacgctcaataagtgggtgtcgaataaataaatgtcccacgctgaggcttaggtacgttatgatactcattttacaaaagagaaaactaggacacacaaagattaagtcattgggtcgcacacctagtaagtgggggaggcgagtcctcagcacacgcccaataacagcattattatgattactagccgcttactcaggccttgagctaagtgctttaccctgaatcatcgcgctcaatttagcaataaccccgagccggcaccgtcgcgaacgccactttccaaaggaggaagccagggccagacgttgccctgcaaggccggggctgggccgggttcgaacccggacgcctgacgcgccctccgctctcccagaggcgttaccttggtggcccccgcttcctccccacggagcccggcgctcacccccgggccggggtcggggtcgtgagcccacagctcagccaccatctccgtgtgaagaaactcaaacaacacagtatccgccatgccccctcctcgcacgcctaaagatgcgcccagcgcttccagctctcattggccaggcttggtaagccacgcctcttgcgtcatggcgcgagccctcctactccggcttccattggtgttttagactagccccgcctccccgccccggactcaggtggtgtgcgcgtgagcctgggacactagggggcgggcctacgccttctctggccacatgtggcaacatcttctgctcttactgccgtcccttccctatttccgggttctcgagcattcctattggccaaattactggttacacgtgacatactcggcttttaaaatccctattggtccactccagactttcctcgtcgcacaacctggaagagccggcccagctgtttctctattggcggttcctccattcatgtgactcttctgcacgctcactcaaagctgatgctgagaacttgcttcctgattggtagccgggcgaatccacgtgacttggccgctaatgcccgcccaacccgctcccctattggttgaaatcacagcccttcagctgccacggtgagaacgcagcactcgggttaggaagcggatctcgcaagctccgagcgtcagctgccgggtacggtctttggcgttagcgcttctcccatcccatgagtgcccccagcagagtccagtcggactgtcatcctttctgcgactctggcgctggtcccgagcagctcacgggcccgtgtgcttccgggtctgagattggcatggtggaccaggtggagggtgtggcctctactaggaggcaaattcgtaaagacctcggcttgggactccgggaactcgggccccagatccttgttcgagctggtcttcagtttccccatctgtacgctgaagagcctggggtccagtaacccccatcatcacccagtttacagaagaggaaactgaggcccagacggggagcagctgacaccaagtcgttaagagaatcagcgaaggggctgggaatccaggacctgcgccttttacccaccgcggcgccggtctcacgtgcagtcccttcgctcttctcccctagttcggtgccatggcgtcccagggtcgtcggcggaggcccctgcggaggccggagacggtggtgccgggggaggcgaccgagacggattccgagcgctctgcgtcctcgtcggaggaggaggagctgtacctgggtccttcgggcccgacgcgcggccgccccacggggctgcgggtggctggggaagccgcggagaccgactcggagccggagccggagccggaaccgacggccgcgccgagggacctgcctccactcgtggtgcagcgggaatcggcggaggaggcctggggcacggaggaggccccggcgcccgcccccgcgcgctcgctcctgcaacttcggctggcggagagccaggcgcggctggaccacgacgtggcggccgccgtgagcggtgtctaccgccgtgcaggccgcgacgtggccgccctggctagtaggctggcggcagcccaggcggcggggctggcggcggcccacagcgtgcgcctggcgcgcggggacctttgtgcgctggccgagcgtctggacatcgtggctggctgccgcctgctgccggacatccgcggcgtgccagggaccgagcctgagaaagacccggggccgcgggcctagccatgattctacttcccaacctgactgcaatttgggggtaggccttgctgcctctgggacctgactctgtctcctgtgtctcttatcaccccccacccccgctcccatcttggtgtcacccatgggggctaatccggtccccttggataatgctttatattggatatagttcaacccctactgcggagaccagggccccactatccttagatctggttcctctcccgatcctgaccctgccgcctggttctgagccttcccctggggcttggctccagcctttgttacatagttgctccttaatctgtttccaccctgggggctcaccaattttttttttttttttttttttttggagacagggtgtttatctgtcacccaggctagagtgcagtggcgggattactgctcactgcaacctcgacctcctgggctcaagtgatcctcccagctcagccttcaagagtagctgggactgcagacctgcaccaccacgtccagctgcccggttaatttttttctgtcggtttgaagaggggagaaggtctcactatgttgcccaggcttgtctcaaactcccgggctcaagcaatcctcccactgtggcgtcccaaagtgctggggttacaggtgtgagccaccacacactgggctctgctctgcctttctgagtttggtttctgcttatggtggggagcttgttcccgttcttcccacaagaacccaggatgtggcacagcttccctgccgtcttccttcactcagttggctacgcctcccatcctagctccacttccagaactgccttcaccctaggctgggtccttgttttgtttttagagacagggtctcactgtgtctcccaggctggagtacagtggcgtgatctcggctcactgccacctccacctcccgagttcaagcgattctcctgcctcagcctcccgagtagctaggattacaggcatgcaccaccacgcctggctactttttatatttttagtagagatgaggtttcaccttgttggccaggctggtctcgaactcctggcctcaggtgatccacccgcctcacctcctaaaatgctgggattacaggcgtgggccactgcgcctagccagctgggtccttgttctgctgcccaagcttggccctggttccgtgtgctggttctactttttgttctcccatctgcctcctgcctcctcccctttgagcttagccccgccctctcagcctgatttctgtttcccaagtccagcagtgtcgtgggataggttttgctttcttttactgtctccatcctacttacacctccctgatcctggggtctggggactccccatggtttccttccttctgcaggcccaaaatgatggcccctcttaacccaaggcaggggatcttcctcccaactccctggaccaaggtggcatttcctgcacacccctccaggccaagatgatgctcgctctcaactctgtaggccaaggtggcgtctcctcttgactctccagacctaaagtgacacccttcaggcacttcgggcccaattcagcccagtcctggtgctttcagcgccagatgacagcactttgcagataagaacgatatgatgtgtggatttcactacatttggctcctggatgctataaaaggacttggatttctgacttggctcagggactggggttagcagtctctttctgctccttttcacctgtgttttcttccgatcccagctctggtccctcagccgcattcatatttactctcctctcccagcctgatatccctgtccctcatctcaacccgaagccaagatctgagcccccaagatggagaatggggaggagctttttatggcggactgattaaaactcttaagcatttacccttatggttagttccttttgtttccctatctaagctaagggtgagttggttgatttctctgagaatgggggtcccgagacctccatgcctggcttatggaaggtgaagctgtagttgggaaatcaggggccctagatttttgccctggttctgtatttactcgtattttattaattcaacacacacgttttgggtacctgacctgtgctgcggctaggggtatagcacccagtccctgccctcacagaggtcgcagtccagtgggagaaacagtaataagatgttctcatagatagttctagtaatcataatttatagtttaatttttaaaaatagagatgatagcctggccaacatggtgaaaccctgtagttattaaaaatacaaaaattttgggcgatgtatcacgcctgtaatcctagcactttgggaggccgaggcacgtgctagtaattccagctactcagggagctggggcatgagaatcgcttgaaccctggaggcagaggttgaagtgacccaagatcgtgccactgcactccagcccgagcgacagagcaggactctgtctcaaaaataaataggccaggcgcagttacgcatgtctttaatcccagcactttgggagatcgaggtaggcagatcacctgaggtcaggagttctagaccagcctggccaacatggtgaaactctatctccactaaaaatacattagccaggcgtggtggcacatgcctgtaatcccagctactcgggaggctgaggcaggagaatcgcttgagcccaggaggtggaggttacagtgagctgagatcatgccactgcactccatcctgggtgagagtgagactccatctcaaaaataaataaaaaataattaattttaaaaaataaaatagagacgagctctcacaatgttgcccaagttggtcttgaacttctgagctcaagggattctcctgtcttgacctcccaaagggctaggattacaggcatgagccactgcacccagccataatttataatttagatacaattttcttggcaccatgattagagccatgaagaagtaaaggagctttatgaaggtggagcgggatccacctgacctaatctgggcgggagagaggaagtgatgagtggtgctggagctgagcccggaaggtggaagtaggtgaaatgggagtagggtgaagagttgcagacagggagaacagcatatgcgagggccctgaggcagaagggaaagggaccataacctgtttaacagaagaagatgatttctgctctccacctagaatggagaagtgtggggtggttgtggggcaggggggtgctgagtgcagtaccagaaggggccagataaaggtgagctttaaaaaaattgtattattggctgtgcgcagtggctcacgcctgtaattccagcactttgggaggtcgaggcaggcagatcacctgaagtcaggagttcgagaccagcctggccaacgtggtgaaaccctgtctctactgaaaatataaaaattaggcatggtggcacatgcctgtaatcccagctactcaggaggctgaggcaggagaatcgcttgaacccgggaggcagcagttgcagtgagccaagattgcgccactgcactccagcccaggggacagagcaagactctgtctcaaaaaaaaaaaaaagtaggtgcggatcaaccagcatctcctccctcctgagcactccctccagctccccttccacacctagggcgagtggatcacaattcaaagaggatgatctcccagaacttcccttttctttttcttttcttttctttttttttttttttttttttgatatggagtctcactctgtcgttcaggctggagtgcagtggcgagatctcagctcactgcaacctccacctcccaggtttaagcaattctcctgcttcagcctcctgagtagctgggattataggcacgtgccaccatgcccagctagtttttctatttttttttctttttagtagagatgaggtttcaccatattggccaggctggtctcaaactcctgaccttgtgatctgcctgcctctgcctcccaaagtgctgggattacaggcatgagccaccacacctggtcaggacttcccttttcaatgagtttagcgagagtccctgaggagctgagctgcctgggagagtggcagcttagtggtctcatggtggacttccagccctggagcacagagcttccctcactccttaaactccagctcactagccaggcctggctttcagcccctttctttctttttccctccctccttccttccttcctttctttcggtggggtctcactattttgcacaggctggtcttgaactcctggcctcaatggatcttcccaccttggcatggcagggatgggaatctgattggagagggtacaagagggtgtggaaggagagccagagaccatcctctttgcaatgttgagtgaaggggtgggatggtaagaaatggggaagtggcagtgcatggtggcttacacctgtaatcccagcaatttgggaagccaaggtgaaagcactgattgagcccaggagtttgagaccagcctgggcaatatagcgagaccccatctctacaaaaaatacaaaaactagctgagcgtggtggtgtgcgcctgtggtcccagctactcgtgaggctgagatggaagaatcacttgagcccaggaggtcgaggctgcagtgagccatgattgtgccattgcactcgagc[142 bp omitted]aaaccccatctgtactaaaaatacaaaaaattagctgggcacggtggcgggcacttgtggtccaagctactcgggaggctgaggcaggagaatggcgtgaacccgggaggtggagcgtgcggtgagccaagatagcgccactgcagtctggcctgggtgaaagagcgagactctgtctcaaacaaaaaaaaaaaaaaaaaaaaaaaaaaaaggaaggaagggagggagggaaggagggaccgactggggaagtacctagatggggaagatgggaggggtcatggcatgtttgtatgctgctgggagtatttcagaagagggagaagtcgtgatacaggggaaaggtgggagaaaagccagaccattgtcctgcagtaggtaagaagggaggaggagatagcccccaaggggaagggcaacactggggtaagagagactatttgtggctagttgcaagtcactgggtagtgatgaccactctggtcatcactgcctgggaactggtctgtcacccccactggactgttggccccatgaggacggggctgaggctgtcttggccagggccagctaacccagggaaaccacagagtagatactgggcaaattgtttgttgaatgaatgaatggccttcacaccatcacacggcatcagcctctcagatgcatggagctgttgagacgttcgggcacagcctccctccaaaggtgatgggcactcggtcccacataacacatcaccctcagatgtgcaggatgagagggtcagacatgcaccaaaatgctaataacacccactccacaaatatttgctaaccacatttcaaggggaaaggcattcaaggcagaaagaatagcatgtgcaaagaaccagaggcaggaaaatcctgggggtgcttgtttgggcgagatgaattgtctgttgtgcatggactgctatagaggggcctttggcaggagggagagctgaagactcagtcaagagccaggccacacagggccagaatgaggagcagggctttgtcccaagggccctggggagccaaggcaagttccaagcaggagagaggcagggacgagtttgtgctttagcaagagatacctagatgggtcaggtgcggtggctcatgcctgtaatcccaggcctttggaggccaaggcagatggatcacctgaggtcagaagttcgaaaccagcctggccaacatggtgaaacccccgtctctactgacaatacaaaaatcattctgggcgtggtggtgtgcacctgtaattccagctactcaggaggctgaggcgggagaatcacttaaacctgggaggcgaacattgcagtgagccaagattgcgccactgcactccagcctgggcaacacagcaagactctgtctcaaaataaaaaaaaagaaacctctggctactgagtggagggtgcatgggagggggtgagactgggtctgtcctggtcactctgtgtccccagcaccactagcaaagagcaggtgcacagtaaacacattttgaatgaagatatgaatgaaggaagtggcaaacacttgaattattggacttctgttgtcactgagaataaaagccaaatcgtatattattattattattattttagagatgggatctcactacgttgctcaggctggtcttgaactcctgggctcaagcaatcctcctacctcggcctcctaaagtgagccaccatgcccagcctgtaatcccagtactttgggaggctgaggcaggcagatcacctgaggtcagtagttcgaaaccagcctggccaacacggtgaaaccgtgtctctactaaaaatacaaaaattagtccagtgtggtggcacgcacctgtaatcccagctactcaggaggctgaggcagaatgatcacttgaacctgggacgtggaggttgcagtgagcagagatcatgcaactgcactccggcctgggcgatagagtgagactccgtctcaacaacaacaacaaaaaaaaagtgctagggttacaggcatgagccaccacacccagcctcaacaccacagtctttactgggacattggaggccctatgatctggtcctgggtccatctcgctgagctcatagacaactggccacttcactgagtaatactggactctgggctgtcctctaagctgccagacagagcctttgcaattttgtttttctctggcactcagctctgtatgggcagtgcctatagcaacattgtataacaggcagtcagcaggcagtcactatttgttgacttaatgaatgaatcccctgcagctccactggagaggtctgaacatcatcctcatcagtagaaacctgagctagttggagcaggaggcaaaggagatgggtggaggccaggaggaccaggctgggagaattccaggatagggactggggcaggggtcagggtcagggtcaggggctggagctgatgtccagccaagagcagaatctagaatggaactgggacagggatgggggctggggccatgggagggacagggccaggggctagggaggggacacgattgggggcgacctcggttaagggcctgactccccaacacctctctttccagagcggcttcacagcaggaccacaggagtcattgtggccaacttcgctggaggcttggagatctttggggccattaaggcagagctgcagggcctagagattgagatgctgggtatgtccccacacctgcttggggagccccgccaagctgcaggcatcgcacactgacccagggccctttgtgatcacccttcacctggccccatctggtctccttgggactgttggggtgacacagcctgttccctctcgcccagtgaacaatgtggcatgctgtatgcgcagggacgcttgaggaagctgctcgactgtgagaatgtcgccagagtgaaacagagtcctagcccacctggcacctcttcctccaactctttactgccctctgttggaaaactcgcgtaatatacaaaggtaaagtcctcacttgggtacctgtgggggattccttccaggacccccactgatgccccagaccctaatacaaaatggcctagtatgtgcacataacctatgcataccctcccgtgcactttatttttttttaattttttaattttttgtgggtacatagtagatgtatatatttatggggtacattatgagatgttttgatacaggcatgcaatatgtaacaattacaacatagaaaatggggtatccactccctcaagcatttactctatgttacaatccaattacacatttttttttgagagagagcctcactctgtcgcccaggctggagtgcagcagcgtgatctcagctcactgcaacctctgcctcctgggttcaagcaattctcctgcctcggcctcccgagtagctgggattacaagtgtatgccactatgtccgactaatttttgtatttttagtagagtcaaggtttcaccatgttggccaggctggtctcgaactcccaacctcaggtgatctgcctgcctcagcctcccagagtgctgggattataggcatgagccaccgcaactggtcaattacacccttttcgttattttttttctttttaatagagatagtctctgccatgttgaccaggcttgtacagaactcttggcctcaagcagtcccccatctcagcctcccaaagtgctgggattacaggtgtgagccacagcgcccggcttcttttagttactttaaaatgtacaactagtcacccggatgtgctgtcaaatagtagatcttattcattctttctaattattattattattattattattattattattattatttgagacagagtttcactcttgttgcccaggctggagtgcaatggtgcattcttggctcattgcaacctgtgactcccttgttcaagcaattctcctgcctcagcctcccaagtagctgggattacaggcacgcgcccccatgcctggctaattttttatatttagtagagacggggtttcaccacgttggtcagactggtctcgaactcctgacctcaggtgatccacccaccttggcctcccaaggtgctgggattacaggcatgagccaacactcccagcctattattattattactattttgaggcagagtcttgctctgttgcccaggctggggtgcagtggcgtgatctctgctcactgcaacctctgcctctgcccagctaatttttgtatttgtagtagagatggggtttcaccatgttggcctggctagtctcaaactcctgacctcaggtgatcctcccgccttgggctcccaaagtgctgggattacaggcatgagtcactgtgcccggctgttctttctaattattatttttgtacccattaaccatccatcccctcctctgccacctccccaaccccactggctaatttttatatttttaatagagataaggtttcaccatgttggccagcctcgtctcaaactcctgacctcaagtgatccacacaccttggcctcccaaagtgctgggattacaagtatgtgccactgcacccagccagagcgccattgaatgttatttgttacttctgtcttgctgcttttaggattctttctttatccttgacctttgggagtttgattattaaaggacttgaggtagtcttcttttttttttttttctttttttgagacggagtttcgctcttgttgcccaggctggagtgtaatggtgcgatctcacctcaccacaacctctacctcccaggttcaagtgattctcctgcctaagcctcccgaatagctgagattataggcatgtgccaccaagcctggcttttttttttttttttttggtattttttagtagagatggggtttctccatgttggccaggctggtctcaaactcccgatctcaggtgatccgcccgcccaaagtgttgggattacaggcgtgagccaccacgcccggcaggtagtcttctttgggttaaatctgcttggtgttctataaccttcttacatttgaataccgatatccttctgtagatttgggaagttctgtgttattattcctttagataaaccttctacctctgtctctctctacctcctctttaagtccagtaattcttagatttgtccttttgaggctattttctagattttgtaggtatgctttattcttttatcttttgtctcctctgtgtattttcaaatagcctttcttcaagttcactaattatttctttttttttctttttctaagatagagaaaggggtcttgctatgtaacctggcctcgtctcaagctcctaggctccagtgaccctcctgccttggcctcccaaagtactgggattacaggcatcagtcaccatgcccagccactaattttttcttctgcttgattaattctgctggtgagagactctgatgcattctttagtttgtcaattgaatttttcaactccagaacttctgcctgattcttttaattatttcaatctctttgtttaatttatctgatagaattctgaatttcttctgtgttatcttgaattttgttgagtttcctcaaaacagacccctccttctctctctctctctctctcccccacccatatatatagtttttgtttgtttgtttcttgttgagacaagatctggctctatcacccaggctggagtgcagtgccacagtcttggcttactgcaacctccacctcctgcgctctaaccatcctctcaccttagcctcctgagtagctgggaccacaggtgcacactaccatgcctggccaatttttgtattttttttgtagaaacggggttttgccatgttgcccaggctggtctcgaactcttgagctcaagtgatctgcccacctcagcctcccaaaatgctgggattacaggcgccagccactgcacccaaccccagaacagctaatcaattatctgtctgaaaggtcacgtatctctgtctctctatgattggtcactgatgcttttattttatttt[132 bp omitted]cctcagcctcctgagtagctgggaccacaggcacccgacaccacgcccggctaattttttgtttttttagtagagacggg[146 bp omitted]agagttttgctcttgttgcccaggctggagtgcaatggcacgatctcggctcaccacaacctccgcctccctggttgaagcgattctcatgcctcagcctcccgagtagctgggattacaggcatgcaccaccacgcccagctaattttgtatttttagtgagatagggtttctccatgttggtcaggctggtcttgaactcccaacctcaggtgatctgcccgcctcggcctcccaaagtgctggtattacaggcatgagccactgtgcccggccggctttatttagtttctgtggtgaggtcatgttttcctggatggttttgttacctgaggatgttcatacatttctgggcactgaagagttaggtatttattatagtcttcacagtctgggcttgtctgtactcatccttctttggaaggctttccaggtattgaaaagacttttgtgttgcgatctaagtctttagtcactgcagctgtatctgcatcagggggcaccccaagcccaggaatgccgtggcccttggagacttgtagagacactgccttggtggtcttggataagatctggaagaattctctggattatcaggcagagattcttgtcttcttccttttctcccaaacaaatggagtctctctgtgctgagctgcctggagctgggggaagggtgatacaagcactgctgtggccaccagtgctgggactgtgctgggtcagacgtgtagccagcccaacacggggtctcccccaaggcccgtggtcagcactgcctgggtaccacctatgtccactgaaggccctagggctctgtgaggagcagacggcaaatccagccaggcttgtgttcatcctttcagtgtggtgtgagccccccatcacaggtgcgcccagagatgccatctgggagccagggcctggagttggaaaccttagggactctacctggtactctgttctactgtggctgagctggcacacaagccacaagacaaaatcttccccactcttttttctgcaagcaggggagcctctccctgtggccaccactgccccaggaccatggcagctactgcttggctactgccggtgttcatttaaggaccaaggtctcttcagtcagcttgtgtgaaggctgccaggcctgggtctctcccttcagggcagtgggctcccctctggccaaaggtaggtccagaaatgacatccaagagccaaggcctggaatcagggacccccaagagccaacttggtgctctactccactgtggccgagctggtaactaagctgccagacaaaggcccctttactcttccctcccgcttccttgagcagtaggagcctctccccgtagtcaccacgtcagggaatatgctgggtcatatctgaagtcagtgtgtctctgagtctcactcaaggcccacacggagtactgcctgggtactgctgctgattattcaagggtcctttagtcagcaggtaatgaatcctgcctggactgggctatttccttcaaggcagcagtttcttttctggcccagatgtttctagaaatcgccttgaagctagagcctggaatggggccctcaggaccctgcttggtgcgctatcctacggtggctgagctgatatccaaggtgcaaaacaaagacctctttattcttcccgcttatctcctccagtgtgaggaagacatttcaagccaggcgtggtggctcacgcctgtaatcccagcactctgggaggctgaggcaggcagatcacctgaggtcaggagttcgagaccagcctgaccaacacggtgaaaccccgtgtctactaaacatacaaaattagccgggtgttgtggcacacgcgtgtaatcccagctactcaggaggctgaggcaggagaatacttgaacccaggaggcggaggttgctgtgagccgagatcactccattgcactccagcctgggcaacaagagcaaaactccgtctcaaaaaaaaaaaaaaaaaaaaaaaaaaaagagactatttttgctaccccgttcagtggctctttcagtgatatgaagttaaaaccaggtactgtgttcgctcacctgattttggttcttatgaagtgcttttttgtgtggatagttgttcagctggttgttcttctgaaggagatgattactggaggcttctattcagccatcttcccctgcctcctcataattgctatctctttattgattttctcatgttgtttgtatattggttgtatatcattttcctgatttccatttattctttgtctatggtttcctttagctcataaagcatatttaagacagtcgatgatgtctgtgactagtaattccaatgtctgtgcttcctcagagatggtctctgtcaaaagaacttttttttactataaataagccatacttgcccgtttctttgtatgttttgtagtatttttgttgaaaattggacttttggagtattataatatgttaattattgaaattggattcaccctttccttggagattgctgggttttgcttgtcaagggctagagccatctgtttgactttttaaaactgtttttgcaaaatgtgtattccttttgctgtgtagtcactgaagtttctattccattttttctgttttttttttgttgttgttgtttttgtttttgagatggagtcttgccctgtcgcccaggctggagtgcagtggtgtgatctcggctcactgcaagctcctcctcccaggttcatgccattctcctgcctcagcctcctgagtagccgggactacaggcacccaccacc[131 bp omitted]caccgcgcctggcctttttttttttttttttttttttttaatgagatggagtctcactttgtcgcccaggctagagtgcagtggcacgatctcagctcactgcaacctctgcctcccaggttcaagcaattctcctgcctcagcctcccaagtagctgggattttaggcctgtgccaccatgtctgcctaatttttgtatttttagtagagatggggtttcaccatattggtcaggctggtctcgaactcctaacctcaggtgatccacctgcctcagcctcccaaagtgctgggattacaggcatgagccaccgcgcccagccaatttctcaggtatttatttatagcagtataaaaacagactaatacacccgcgatcgttccatttatttccctcttgtttattatgagcacatatgtgttccaaaagacagtgtgcttagataaattgtttgtaccttcaaactagacacaatctaaatgtcaatccattggtgactgggtaagtaaagcatgctacattcatacaacagacattatagcaatgaacacgaatgaccttctgctgtacacaacatgaatgtatctcacaagcataatgttccaccaacaaagccagagcacataccgtatgattccacttatctccagtcagaaccaggcaaaaccatgctaggggtgttgaaggtcaggacagcagttaattggggaggaggcaaggggtaatgactgcatgaagggttgcatctgagccactgtcaatattgtatttcttcataggggtggaaattaaagatttgtgttcacactaaaaatttgtgaactctggtatgtgtgttatacttttttttttttttttgagatggagtttcgctcttgttgcccaggctggagtgcaatgacatgatctcagctcactgcaatctccgcctcccagttcaagcgagtctcctgccccagcctcccggtagatgggattacaggcatgcgccagcacgtagtagagatggggtttctgcatgttggtcaggctgggcttgaactcctgacctcgtgtgatccacccacctctgcctcccaaagtgctgggattacaggtgtgagccaccgcgcctggccaattttttattctttttgaggcagggtctcactctgccaccttcctaaggtgcggtggcatggtcatggctaactgtagcctagacctcctgggctcaggcagtcctcccacctcagccacccgagtagctgggactacaggttcacaccaccatgcccagttactttttgtaattttaccagagacggggttttggaatgttgcccaggctggtcttgaactcctgcactcaagtgatccgcccactttggcctcccaaagtgttgggattataggcatgagccacagggcccagccacaaatgtatatttaatttacatggaagcctactgttctcctccctccctccttccctccctccctccctccctccctctctcccttcctccctccttccttccttcctcagagtttctctcttgttggccaggctggagtgcaatggcatgacctcagtgcactgcaatctccgcctcctggcttcaagtgattctcctgcctcagcctcccgagtagctgggactataggtgtgcaccaccacgcttggctaatttttgtgtttttagtagagacaaggtttcaccatgttggccaggctggtctcgacctcccaacttcaggtgatccacccgccttggcctcccaaagtggtgggattacgggcgtgagccaccgtgcccagcctgcctttttcaagtagtcatatgtcttggagagcattctaatcagaatgaaaaacagctgagccattctgtttacttatacggtgaccaagccatctgctagtcattcccctattgatgatcattcagggtgttccctattgtttgtgactacatatggtgtggcaaagaatatctttgaatatattcatttcccacatgtatgggtatcttggaaagaaacacatttccagatgtggagttgttgggtcaaagggtgagtacattttaaattctgttaggtgctactttattttttaattttttatttttttttgagacaggatctcattctgttgcccaggcatggtggcacatgcctatgatcccagctacttgggtggctgaagctcgagaattgcttgagcccaggagatggaggttgcagtgagctgagatcgcaccagtgcagtctagcctgggtgacatagcgagactctgtctcaaatataatgcaacatggtgtccatggtccaggtgaggctgagctaggaggtctgaggtcagggtaggtctgacccctctgggtggtcctcagtgtcccacagcactgagcctgccaaggaggaggtgctaggggaatattcctgagggaatttagggagatgggagtgaatttgatgagcaggaggcaggggtctttgggtaagtgagagaatt[131 bp omitted]ctactaaaaatactaaaaatacaaaaaattagccaggcatggtggcgggtgcctgtagtcccagctacgtgggaggctgaggcaggagaatggcgtgaacctgggaggcagagcttgcagtgagccgagatggggccactgcactccagcctgggcaacagagcaagactgtctcaaaaaaaaaaaaaatcaattttaggaaagtgtctgagagagatcagtgactcagaagagtttgagtggggaagtgctcagaagccatggcttcttgcagggggtatggtcccacaggggcccacggggtttcctgggcacagggacccaagtgggacctcagcaggtgggtgggatgctgggagtggagggggctgaggggtgttctttcctttactcccttatggctgcagtgagctatgatcgtgccactgcactccagcctgggtgacacagtgagaccttatctcaaaaaaagaaaaagaagtccaggtgcggtggctcacacctgtaatcctagcactttgggagaccaaggtgggaagatttgctagagctcaggagttcaagaccagcctgggcaacatggcgaaaccctgtctctacaaagtaaacaaaaattagctgggtgtggtggcaggtgcctgtaattccagctacccaggaggctgaggcatgagaatcacttgaacccgggaggtggagtttgcagtaagctgagattgtgccactgcactccagcctgggcaatggagtgagactctgtctcaacaacaaccaccaaaaaaaaagaagaagaagaaaaagaataaaaaagaagatttagaggctgggtgtggtggctccccctgtgatcctagcacgttgggaggccgaggcgggtggatcacctgaggtcaggagttcaagaccagcctggccaacatggtgaaaccccgtctccactaaaatacaaaaattagccaggcatgatggtgggtgcctgtaatcccagctactcaggaggctgaaacaggagaattgcttgaacctgggagatggtggttgcagtgacccaagattgcaccactgcactccagcctgggtggctgagcgagactccgtctcaaaaaaaaaaaaaaaaaaaaaaaaagatctagaaaggagagttagggagtccatgaaaaatctctagccagccctcctgaagcactagacaggggaacaagtcagagtttgcaggaaaatctgggaagtcaggcatatccaactatcagagtcatggaaggctgttgcctctgcatctgatgttgagcccgaggtcactggtggttagcagggcagaaaattgagaagagataaacaggagtgtgggggaaacaaggtcccgaacacttgcatctgtctcaccctgcagggcagagcgagagcaaatgggaaccccctaatgcatctacatctgtcttttcccccatctaaatagagcaaccgtccaagaaaaatactgtgctaaacttctttcttccagttttcatgcaattttctcctttggccaactctaacttagaaccatatggggaaggggtttttttgtttgtttgttttgttttgttttcagagtcttgctttgttgcccaggctctggagtgcagtggtgcgagctcggctcactgcaacctccgcctcccaggttcaagcaattctcctgcctcagcctcccaagtagctgggattacaggcacccgccaccacgctcagctaacttttttgtatttttagtagagacaaggtttcgccatg[134 bp omitted]tagcctgtgaggtttccactgaagtctgctgccagacgtattggagctccattgtatgtttgtttttgtttttgtttttgagacagagtctcactcagtcacccaggctggagtacagtgacgaaatctcggctcactgcaacctgcacctcccaggttcaagcgattctcgtgcctcagcctcccgagtagctgggattacaggtgtgagccactgcgcctggcctcatgcctggctaattttttttgtatttttagtcgagacgggatttcaccatgttgcccagactggtctgtaactcctggcctcaagtgattcacccgcctcagcctccctaaatgctggggattacagacgtgaaccactgcacacggcctccattgtaagttatttgttacttttctcttgctgcttttaggaccctttctttatccctgatctttgggagtttgattattaaatgccttgaaggtagtctttgggttaaatctgcctagtgttctataaccttctcgtatttgaatattgatatctttttctaggtttggaaagttctctgttattatcccacttaataaactttctattccaatctctctactttctctttacggccaataaaactcagatttttcctttttgtggctattttctagatcttgtaggtgtgccttattctttttttttttttttttttttttttgagatggagtcttgctctgtctccaggctggagcacagtggcacgatcttggctcactgcaacctccgcctcccgggttcaagcaattcccctgcctcagcctcccgagtagctgggattacaggtgcctgccactacacctggctaattttttgtattttggtagagatggggtt[132 bp omitted]cctctggctgtgtcttgtcctgtctcatctcttttctcttctcttctgttctcttctgttctcttctcttctgttctcttctcttctttcttctcttctcttctcctcctctcctctcctctcttctcttctctttttgagacagagtctcactttgtcgaccaggctggagtgcagtggtgctgcaatcttggctcactacaacctccacttcctgcgttcaatcaattctggagcctcagcctcctgagtagctgggattacaggcatgcaccaccatgcccagctaatttttctatttttagtagagacaggatttcactatgttggccaaactagtctcaaactcctgacctcaggtgatccaaccacttcagcctttcaaagtgctgggattacaggtatgagccactgtgcccggcctgactgcatattttcaaatagcctgtctttgagctcaccaattcttcaggttgatcaattctactgttcagagactgatgcattcttcagtgtgtcagttgaattttttctacttaatttttttttttttttttgagacggagtctcgctgtgtcgcccaggctggggtgcagtgacacgatctccgctcactgcaagctccacctcccgagttcatgccatcctcctgcctcagccttccgagtagctgggactacaggcgcctaccaccacgcctggctaatttttttgtatttttagtagagatggggtttcaccgtgttagccaggatggtcttgatctcatgacctcgtgatccacctgcctcggcctcccgaaatgctgggattacaggtgtgagacaccgtgcccagcccctttctgcttaatttttaaaaattatttcaatctgtttggttaatttatccgataggattctgaatcccttctctgtgttatcttgaatttcattgagcttcctcaaaacagctgttttgaattctccgtctgaaaggtcacatagctctgtcacaatggggttggtcactggagccttgtttagttcacttggtgaggtcatgttttcctggatggtgtcaatgcttgtggatgttcgtcaatggctgggcattgatgagttcagtgtttattgtagtctttgtagtctgagcttatttgaacccatccttcttgggaaggcttgccaggaaattgagtgttgtgaactaaacttttggtcactgcagctgtatctgcattagggggcaccccaggctcagtaatgctgtgattcttgcagcatcttagaggtgctggccaggcgcagtggctcacgcctgtaatcccagcacattgggcagcctaggcaggcggatcatctgaggtcgggagtttgagaccagcctggccaacatggtgaaaccctgtctctaccaaaaaatacaaaaatttgccaggcgtaggggtgggcgcctgtagtcccagctacttgggaggctgaggcgggagaatcacttgcgcatgggaggtggaggttgcactgagtggagattgcagcactgcattccagcctgggcgacagagtaagaccctgtctcaaaaaaaaaaaaaaaaggaatcttagaggtactgcctcagtggtcttggttaagattcaggagaattccctaaattaccaggcagaaactcttctcttcccttactttctccaaacaaacgcagtctctctatctctgtacggagctgcctggggctgctggaggggtgacacaagtacccttgtggccaccaccactgggactgcactgggtcagacccaaagccaacacaccactaggtctcacccagggcccgtggcaaccactacctggcttccaccaatgttcacacaaggcccaagggctcttcggccagcaggtggtgaagcctgccgggcttgtgtccttcccttcaggatggtgagttctctcctggcccagggcaggtccagaaatgccatctgggagccagggcctggagacagaaaccttaggaatctacctggtgctctattctactgtggctgagctggcacccaagccacaagaaaaagtctttcctacttgatatggtttggctgtgtcccacccaaatctcatcttgatttgtagctcccataattcccctatgttatagggggtacccagtgggagataagtgagtcatgggggcagtttcccccatactgttcttgtggtattgaataagtctcatgagatctgatggctttataaggggaaacccctttggcttggttctcat[181 bp omitted]ctgtaatcccagctactctggaggctgaggcaggagaatggcgtgaacccgggaggcagagcttgcagttagcccagactgtgccactgcactccagcctgggtgacagagtgagactccatctaaaaaaaaaaaaaaaaaaaaaaaaaaagacgtgcctttcagcttctgccatgattgtgaggcctccccagccacgtggaactgggagttcattaagcctctttttctttattaattacccagtctcaggtatgtctttatcagcagcatgaaaacagactaatacaccactcttccctcacttttcctcacacaggagtctctctctgtggccaccactgctccaggcccatggcaggtactgcctggctactgctgatgttcactcaaggcccaggccctcttcagtcagcttgtggtgagtgctgccaggcctgggtcttttccttcagggaagacagctcccctctagcccagggcaggtccagaaatgctgtgcaagagccaagacctcaattggggatgccagcagctgctgggtgctctaccctactgtggccaagctggtgtccaagatgcaagacaaagtctcctttactctttcctctcctttcctcaagcaggagtctttccccagggccaccacagctgggaatgcgctgggtcacacctgaaatcagcacggcactgggtctcacccaaggcctgcggcgagcactctctggcaaccactgatgtttattcaaggcccaagagatctttagtcagcaagtaatgaatcctgccaggactgggtccttcctttcaaggcagcggcttcccttctggtccagggtgtgtccaaaaatgtcatccaggagttagggcctggaatgggggcctcaggactccgcctggtgccctatcctcctatggctgagctggtatccaagttgcaaaacaaagacctcttgacttttcgtctcctcttctcaagcagaaggaaggagtctctcccggaactgcaagctatactgcctggggtttggggctcgggggctcaagcactcccttggctgcctcagccaatgtctcagtgggcctcatgccctccaggtccacttgttctgagcccagcaaggcaccaggacttgcccagaaattgcagtccttgtggcctgactgcctttcaagtttatttatttatttatttatttatttatttgagatggagtcttgctgttgtccgggctggagtgcaatgacgtgctctcggctcactgcaatctctgcctcttgggttcaagcgattctcctgcctc[134 bp omitted]gcttcccaaagtgctgggattacaggcatgagccaccgcgcccagcctcaagttgatttagggtcccagagcactttggcccgcagtggctaggcatgccagaactcaggttctcaccactagaatagatgatttccctctgtctaatgatcatttaaatgctccctccatgggtggtgtctgatttctgccccatggtgctttccactgtaatagaacagcgctgagttccaatgcaaagcctcaaatcagtcactgagctctccctaccccaaatgcacagattctctctccttgccatctgactgctgccaggagatgtgggaggggtggcattttggggtagcacctcaccccaaaagcccattggcttaaaatagcagtcccatcccaaaatctcaaaccaccccaaaagctcattggcttaaaatagcagtcaaatatgacatctcatggttcagtaggttaagtgggtttaaccagtcgattcttttttttttgagatggagtctcactatgtcgcccaggttggagtgcagtggcgcaatcttggctcactgcaatctctgcctccccggttcaagcaattctcctgcctcagcctcccgagtagctgggattacaggtgctggctaccacacccggctgatttttgttttgcctttttttttttttttttctgagatggagttttgctcttgttgtccaggctggactgcaatggtgtgatctcggtttactgcaaacctccgcctcctgggttcaagcgattctcctgcctcagcctcccgagtagctgggatgacaggcacccaccaccatgccccagctaatttttttgtattttcagtagagacagggtttcaccaagttggctaggctggtcttgaacccctgacctcaggtgatccatgtgcctcagcctcccaaaatgctgggattacaggtgtgagctactgcaccctgccaaatgagccaatgattgggtggagtttctcaactagttgcattcagatggcagctggggctggagtcatccaaaggctcagctgggctggaaatccaagatggcgtcttacatgtctgacatctcagttgggatggctagatcagctgcggctgaccagttatctatctctctctccatgctgcctcttgccatgcccagcttcagcttctgcatagcatggcagtctcaggatattcagaattttttttttttccccagatggaatctcactctgccaccaaggctagagtgcagtggcatgatcttggctcactgcaacctccacctccagggttcaagtgattctcgtgcctcagcctcctgagtagctgggattacaggcatgcaccaccatgcctggttaatttttttgtatttttagtagagacagggtttctccatgtttgctaggctggtctcaaactcctgacctcgcgtaatccccccaccttggcctcccaaagtgctaggattacatgtgtgagctgccatgcctggctgaaaataatagatttatacctaaccatactaataattgcattgactctaaattatgtaaacatccaattataagacagagatttcagactaaatgaaaaagcatgacccaactctatgctgcccacaagaaattgtgtgtgtgtgtgtgtgagacggagtcttgcactgtcgcccagactggagtacagtggcatgatctcagctcactgcaacctccacttcccgggttcaagcaattctcctgcctcagcctcccaagtagctgggattacaggtgcccaccaccacacccggctaattttttgtatttttagtagagatgaggtttcactatgttggccaggctggtctcaaacacctgaccttgtgatctacccgcttcagcctcccaaagtgcagggattacaggcgtgagccctgcacctggccaaaatacactttaaatagaaagacgttctgtacaaaagttaactcaaaatggaccacatcactaaatgcaaaacttaacatttctagaaggaaacataggagaaaatctttgtgaccctagatgatgcaaaagttcattatgtacaagcatgatcataagagaaaatcttgataaattagattccatcaaaattaaaaacttctgctcttcaacaaacattattaggagaatgaaaagataagccaaacagtgggagaaaatatttgcaaattacatacttgataaacaactagtatccagatattttaagaacccttaaaagtcaatagctagaaaacaaacaacccaattatttaaaaagggcaaatgatttgaataaacacttcactaacgaagatatgcagatgacaaacaagtacacaaaaagctgctcaacatcctcagtcgttagagaaacgcaaatgaaaaccacaaggtcactctccacctattagagtggttatcgtggagaaaagaggcagagtgattgcttgaggccaggagtttgagaccaacttgggcaacatactgagataccgtct[134 bp omitted]tctagtaaaaaaatatatataccaaaaattagctgggcatggtggcgtatgcctgtaattccagctatttgggaggctgaggcaggagaattgcttgaaccccggaggtggaggttgcagtgagttgaaatcccgtcattgcactctagcctggatgacaagagtgaaactctcaaaaaaaaaaaaaaaaaaaaaatctattattttcatggtttttcctgattcatctggtcattgttctctttttccaccttcttttggattaatcaagtttttttttttttttttttttttgagcaaggatctcactcttttgcccaggctggagtgcagtggtgtgatcatggctcacttctgcctcgaactcctggacaaaagtgatcctcctaccacagcctctccagtagctgagactataggcgtgtgcccccacacctagttaaatttttttttttttttttaatagagatggtgtctcatgtgctgcccaggctggacttgaactcctgggctcaagtgattcctcccgccttggcctcccaaagggctaggattataggcatgagccactatgactggctggattaatcaagtaatttttttatgattccattttatctcttttgtaggcttattagctatagctctttgttttattattttatttatttatttatttgagagtttcactcttgtcacccaagctggagagcagtggcacgacctaggctcactacaacctctgccgcctgggttcaactgattcccctgcctcactcagcctccagagtagctgggattataggcgcctgccaccatgcccagctaatttgttttaatagagatagggtttcaccatgttggccaggctggtcttgaactcctgacctcaagtgatccaccctcctcagccttccaaagtgctgggatgacaggtgtaagccaccgcgcccagctattttattttttttgagacagagtctcactctgttgcccaggctggaatgcagtggcacgatatcggcttagtgcaatctctgcctcccgggttcaagtgattttcctgcctcagcctcctgagtagctgggactacaggtgcccgacaccaagcccgactaatttttgtatttttagtaga[156 bp omitted]atctttaact[146 bp omitted]ggaggctgagtcacgagaattgcttgaacccaggaggtggaggttgcagagagctgagatcacaccactgcaccccagcctgggagacagagcgagactccatctcaaaaaattaaaaaaaatttttgcctagtgctacacataggaatgtgcaggtgcacacgcatacacctgcatacacacacatgtgcacaggtacacataggagtgagtaaaaccagtgaaattggaagattaaggtcttagaattgaactaatgtcaatgtcctgttttgatgttgtattacagttatataagatgttagcatcaggtaagtggatgaagggcaaacaagaccaccatgtactttttttttttttttgagatggagtcttgctgtgtcacccaggctggagtgcagtggcgaaatcttggctcatcgcaacctctacctcctgggttcaagcgattcttctgcctcagccttccaagtagctgggattataggcacctgccaccacgcccagctaagttttgtatttttagtagagacgggttttgccatgttggccaagctggtctcgaactcctgatctcgtgatctgccctccttgacctcccaaagtgctgggattacaggcatgagccaccacacccagcctctctttttgtaacttcttatgaatctataatctcttagaaataaaaataatcagtcaggtgccatcgctcatacctgtaatctcagtactttgggaggccgaggtgggtggatcatttgaagtcaagactttgagaccagcctagccaacatggcaaaa[131 bp omitted]tgaccaacagggtgaaacaccatctctactaaaaatacaaaaattagctgggtgtggtggtgggtgcctgtaatcccagctacttgggaggctgaggcaggagaatcacttgaatccaggaggctgaggttgcagtgagctgaggctgtgccattgcactccagcctgggcaacaagagtgaaactatctcagaaagaaaaaaaaaaaagcccacaagtatttggaaagtaaataacccagaagtcgaagaagaaatcaaaagagaaagtataaactacataaaactcaatgaaaaaaaataacatatcaaaatacatgacatgagataaagtaatgcttagaaagacattgatagatttttaaatgcttaattagaaaagaggaaaaggaggactggggagacggtggtcaaaggatacaaatttcagttaggaggagtaagttcaggagatctattgcacaacatggtgactacagttttgttttttttttgttgtttgtttgagatggagtctctctctgttgcccaggctggagtgcaatggtgctacctcggctcactgcaacctctgcctcccgggttcaaaccattctcctgcctcagcctcctgagtaactgggattacaggcgagcaccaccatgcccggctaatttttatatttttagtagagatggggtttcaccatgttggccaggctggtcttaaactcctgacctcaagtgatccgcccaccttggcctcccacagtgctgggattacacgcataagccactgcgcctgaccaactacagttaataacaatgtattgtatacttgaaaatttcgaagagagtagttctatttctttattttattgttattattgtttttttctgagacagtgtcttgctctgtcgcccaggttggagtgcagtaatgcaatctcggctcactgcaagctccgcctcccggtttcactccattctcctgcctcagcctcccgagtagctgggactacaggcgcctgccactacgcccagctaattttttgtatttttagtagagacgag[146 bp omitted]caggctggagtgcagtggcaccatcttggctcaccatctttgctcaccgcaacctctgcctcccgggttcaagcgattctcctgactcagccttccaagtagctgtgattataggcatgcgccaccacgcccggctaatttttgtatttttagtaaagatggggtttcactgtgtt[134 bp omitted]ttatgcacatgaaaaacatcagtcacaaaagactacgttatgtatttccaaatgtgaaaagtccaaaataggtagattaatagagacagagagattagtgtctgcttagggctagaaagttactagggagattggatattaactacaaatgagtatgaggtttctttatttaaaatttttttattgtgctgaaatatacataaaatttactattttaacttttttttttttttttttttttttttttgagatggagtcttgctctgtctcttaggctggagtgcaggggcacgatctcggctcacttcaacctctgcctcctgggctcaagtgattctcttgcctgagcctcctggagtagctgggattatagatgcgccaccacgcctggctaagttttgaatttttagtagagatgtggtttctccacgttggccaggctggtctcgaactcctgacctcacatgatccgcccacctcggcctcccaaagcgctgggattacaggtgtgagccacctcacccggccacttttttttttttcttttttaatgagacaaggtctcacctatcatctaggctacaacgcagaggcacaatcacagccaactgcaaccttgaacacctggcttcaggcgatcctcccacctctgtgtcccaaactgctgtgtgagccactgtgcccagccaaaagctgtttttcaatggaggaccaacatctgaaaagtacattg[135 bp omitted]tgtctttacaaaacaaataaaatattagctgggtgtgctggcacgagcctgtagtcccagctactcagaaggctgaggtgggaggatcacttgggctaggaggtagaggctgcagtgagctatgatcgtgtcattgcactccagcctgggcaacagagcaaagaccctgtctctaaaaaataaataataaatgtctatggactgcacaatattgttgattcctcaactcctctcttgctcttttgcatattggcaacataaaaagtgtcattttcgggctgggcacagtggctcatgcctgtcatcccagcactttgggaggctgaggcgggtagatcacttgaggtcaggagttggagaccagcctggccaacatggtgaagccccgtctctactaaaaatacaaaaattagctgggtatggtggtggtggagggggggcacctgtaatcccagctactcaggagcctgaggcaggagaataaattgcttgaacctgggaggtggaggttgcagtgagctgagatcgcgccattgcactctagcctgggcgacagaatgagactctgactgaaaaaaaaaaaaaaaagaaaatgtcattttcagagggcaaagtgaggaaggtgcaccctcaggacattcttgcctcagcctggggaaagagagtttaagcaattcccccagaaaggcacaggaacctcagcccagagaggggcagcttcctgcctcgggtcaggaagcacagccttgggctccgagagtccctcgtctctacctccccaagttcaaatgtgcatgcgtgaagttccaaacccagccccagtgctaacccctggctgcctcctctttctgacttctcagggaaaaaaaaaaaaaccacatacacacaaaaaatcccacaagtcaggaaacatccatcacgggctgtccagcccaggccggaggggcaggagtcagcagggaggtgacctcaaggtctccgtggggactaggatccggcggggctgggggtgagaggctggaaattttcccaccccgagactttcctgcgtcaacccaggagggcgccctggatgccgccagccctgcccccaacctccttcctctcctgacagggcagcttcccggctaaggatggatggggagggtgtgccaagatggagccaccaggaccaggaatggacaggcactttgagattgaccagacgagggaccctggctcagagtggcgaaggcctggcctcagagccacacagccaggaggtgtacatgggttggcgtcgctcccagcacatgcagcctccctctacctccactaccctgcccaggagctggagcccagcccggccttgggtgtgtgagaagccactggcccggggccctgcttccccggtccttcctccccacaacacactcaggactcagcccttccttgtgttaaatagaaacctctttattctaagtatcgaacgttccttaatacattggattggggccagaccttgaggtgagggaaaggggcgggggagctgggatatttctgtagagacttccagaacgacactcaccactctgggctatggcaggaggggaggtgctgggaacaggcttcatggccttgggaaaatgctttgtctctttggcctctgtttccccctaccttttttttttttttttttttttgagaaagggtcttgctttgttgaccaggctggagtgcagtggcacagtcatagctcactgcagcctcgaactccagtgatcctccagcctcagcctcaccagtagctgggactacaggcacacaccaccgtgcccagctaattttttattttttgtagagatagggggcaggtctcactatgttgcccaggctggtcttgaactcctgggctcaagcaatcctccggcctcagcctcccaaagtgttgggattacaggcatgagccaccgtgcctggcgtttgtttcccttctgtacagggagtttggggttgggtgaaaagacatctaagggtctttctatcccaggggtgtgtggtcccaggcagggagtcaggaggggcgccgtacgggaggttggcttgtcagcagcatagatggggtcactaaggccggcggttgggtgaccctcagcgctgggcccgaggtcgcgctagagacggaggccggggccgaggcagacaggccaaactgggcctggccagccgggagagggggaggcggcccaggaagagagggaggctgagacagaaagatgggcggggcacagggatgtctgcaaagaaggcacggtcccgagggggtgacagggctccctcctcagagagttccaggtcccgggccacggccaggatctcctggcgggcggctgtgttgcgcaggccacggatgtcgaggagggctgccacgtgcttctgcctgtggggagaggaacagacaggtgcatgcagatccccagctctagacacacacccaacccagccgtggaccccacctgaccccctcacctatcccagaaattgcctgagttctggggcctctgtgtcccctccagagccttccctccaatcagctcccttgcccaggccctcacctcataccagctccctccagaacttcacttccaaccatctccaaatcccccttacaaccaaccccagaaccagccctgggatcttccttttcaccccaagcctcagctcgtgattaaaattcaccttctcagctgggtgccgtggctcatgcctgtaatcccagcactttggggggccaaggcaggcggatcacctgaggtcaggagttcgagaccagcctggccaacatggcgaaaccctctctctactaaaaatacattaaaaaaaaaaaaaagctgggtgtggtggcaggcgcttgtaatcctagctactcaggagtctgaggcaagagaatcccttaaacctgggaggcagaggttgcagtgagctgagatcgcgccactgcagtccagcctgggtgacacagcgagactccatttcaaaagtaaaaaaaagaaagaaaccttgtaccccactccccctaaatcctcagccctaggtacctcctaatctcaagctcaaccccctaaacccaacccagctagcaaactcttaaacttagctacagattcaagttctgactcatgatccaatattcaagttcagaaactccacatcagcaagaatactgggacttcttgggaccccatgggactccaggaatatgtgccttcccaaggacatgaccttatcccccagaatcagaactgaccaccctgaatcaattccaggacccccaccctcagtgctgaaactgaaacccgctcatgcctcactccttgtttttctggggttctgtttctctgagtatgtctgagaatgtgtctgcccaaatagcactgcaaggactggcgttgctccggcagccaccaccactgccaccaccatccagcactgtcacatggtggtgtggtgtgctgatctggtacactagtttttttgtgtgtttgtttgtttgtttgtttgttttgagacagagtcttgctctgttggccaggctggagtgcagtggcgcgatctcagctcactgcaacctccgcctcctgggctcaagcaattctcctgcctcagcctcccgagtagctgggattacaggagtgtgccatcacacctggctaatttttgtatttttagtagagacggtgtttcaccatgttggccaggctggtctcgaactcctgacctcaggtgatccacctacctcggcctcccaaagtgctgggattacaagcgtgagccaccatgcccggccgatctggtgtactagttttagagccagtctactgcctgggttcaagttccacctttgccacttgctaggcgtgatatttcaatagctttaattataccccttacttataggccaagcgcagtggctcacgcctgtaatctcagcactttgggaggcagaggcaggcggatcacctgaagtcaggagctcaagaccagtgtggtcaacttggtgaaatcccatctctactaaaaatacaaaaattagccgggcgtggtggcacatgcctatacttgggaggctgaggcacaataatctcttgaacccgggaggcagaggttgcagtgagctgagatcactgcacttcagcctgggcgacaaagtgagactctgtctcaaaaaacaaaacaaaacaaacaacaacaaaataccccttataaagttggcatgggctgggcaacggtggctcacacttccccattcgtgggaagccgaggcaggcagatcacttgagcccagaagttcgagaccagcctgggcaacatggtgaaacccatctctgcaaaaaatacaaaaaattagctgggcattgtggtgcatgcctgtggtcccagctactcagaaggctgaggtgggagggctgcttgagcccaggaggtcaaggctgcagtgaaccgtgattgtgccactgcactccagccagggaaacagagtgagaccctgtctcaaaaaaaaaagaaaaaaagttggcatgtaagatgcttatttaggtctgaaataagaactcattgagtgagaactggaattgttactatagtcatggatgatgatgatgatgatgatgatgataaatttccctaataaccctatgacgagaatactactatccccatggaacggatgaggaaactgaggctccgagaaggtcacctacaaaggaagtgacctggcaggagttgaatgccgcctgcgcctgccgctgtcccagtgcgtgtgcgcccgtgtgccctgcgtgtccctgagtcccctgcggctcccctgcgggctggcccttcctgcctccaggcagccctgcgcccccctgccctgggcttcctgtgaccgcctgtttgtttgtgagccctggtggcggtggcggcggaggcagcagcggcggcaggagaaggagggaaatcttattaataatgccctggttccagcaggaaacggccgtcagacacgctcaccggctccctccctcaggaggcaggaagcacagggacggatgccaaggccgccaggagacctcggccaggcacggcgagccctggcccaggcggggtgtctcacctgatgtctgggtagtcgcgcaccaacactcccacctccacctggatgctgggcgtgtcttccagctgcatgacttcagccaaatggggcaccacggcatccagccacgaggcctgggactcctgcaggggagggagggtgcggggtcacaccctcccaagattgaccctgccaattcctgcccctcctggcttgttataccatctctaaaatgtagcagaaaccaggggtggtggctcaagcctgtaatcccagcactttgggaggaggccgaggcgggtggatcactagaggtcaggacatcgagaccaacctggccagtatggtgaaaccccatctctactaaaaatacaaaaattagccaggcgtggtggtgcacacctgtaatcccaactactcaggaggctgaagcaggagaatcacttgaaatcgagaggcagaggttacagtgagcggagactgcaccactgcactccagcctgggtgacggagcgagactctgtctcaaaaataaagaataaaaataaaaataaaaaataaaatgtagcagaagacatactatggccacatttgagaaaaatccataatataatctcctcccagttttgcaggtaatttggaactctgggaaacatctccaaacctcttccacgtctgcaaaatcttgcctttgcggggatggagactggacaaagtgtacaaggaagctccctgcattctttcttacatctgcatgtgaatctacaattatctcaaaaattttccaaagaaaacattccaaggactccgggcttggaactccaagaagagcgactgaatgaggcccttccagcccagctgaatacaactgggtacaaataagatctggcggtttttaattccagggtttagaaatgttaggatttctgtgtttctgttgcatgtagtttctctgtacgttcatggagtcttttttttcttttttttttgagacagagtctcactctgtcctccaggctggagtgtggtggcaggatctcggctcactgcaacctccgcctcttagttcaagcgattctcctgcctcaacctcccaagtagctgggattacaggcgtgagccaccacacccggataattttggtaatgcaaggagttttaactctgagccaggcactgtccaaagcacttaacaggaattaaccaatctgatcctcaaaacaatggatagggaccattattcgccttatttaacagccgaggaaagcgcccagaggcgagttctcagagcaagaaagccaggttttaagtgcaaagggtgtcggtcaaagttactggttgctattgacccgaagttgggtgagagtttctgtcctgagctctgcccctctccccctggcttttgggacctgagattctcggaagccaagccttgtcctggtttctgaaacacccccaaccgcgtcccgacactgaccagccgccggaacagcctctgcagttgcgccgcgtcctcccggagcctgccggccacgcggctgcgggtccgcgccgagctgcagcgcaggcgcccacggagcaggggccgcacgtactcgaccagcgcccgccggtgtagctcggctaccagcgcctggaggcggaggagggaaacccgaggggtgtgagccatgccccacggactcccatcccgccagtctgaaggccacccccgccccactcgcccacatccactccgggcacccatgggcacccttcccgtgcccacgccccagtccccagcccctgagctatcctaggatgccttccctggccccctaattagcccgcggacagtctctgccggtccccaaagggtgctccatcccagcctctccccattccccaagctccactctcaggggccctgactcagtctgcaccccgccttacaccccagttccacgcacatgcctccccgcagaccccgggcaggggccacctctcccatccacagggagccgctccccaccttagaggggtttcctccagcaggagcgttcttggctctcccaacctcccaatctcccctcttcccgtccctttcccctttcctcctcccctcttttcccccacccccacctcccctcccctcaggcaggtgcacctggtaaggctcgtcctgcattctgcgcagggccagggcctgggcacccagcgtgcccacgatgccatccagggcctccgggctgctcagccacttccggcgcatcagcttgttgaagtgtggctggcagggacagagtagggggtcacgctctcctccctcccaccctccctcttcacttaggaataagttcctgcaaccctgctccgtgttgaaccagggctgtgcggtgctgggaacacaaggggaagagatagccccagccctggcatccttggactcacagtccagaaggggagagagactggtccccaggtagtgatgacccaaagctggcaaggctgggactcgggaacccaggggtttaggaagcccagaggggatgcctgactcagcatagagccatggagggcttcctggaggaggggacaccggaactgaggccctggtgatgatcttccttagccaagtgagggatgggggagggggagtggctcaatgggagaaaatagtgagtattaagaaagttcagatttcagatgggcatgtcagggagaggaccagcgaaaaggtcagtgtggttgatgaaaacaggggacttcatttaaaaattattaagggccgggcacagtggttcacacctgtaatcccagcactttggtaggccgaggcaggagggtagcttgagcccaagagtttgagaccagcctgggcaacattgcgagaccccatctctacaaaacatttaaaagttagctgggactgcgcgcagtggctcacgcctgtaatcctagcactttggaaggctgcggcgggtggatcacctaaggtcaggagttcaaccctgtctctactaaaatacaaaaattagccgggcgcggtggcgtgcaactgtagttccagctactctggatgctgacacagcagaattgcttgaacctaggaggtggaggttgcagtgagccgagatcacaccactgcactccagcctgggcgacagagtaagactccgtctcaaaaataagtaaatcaattaaaaataataaaaattagctgggtatggtgtcatgtgcctgtagtcccagctactcagaaggctgaggtgggaggatggcttgagcccaggagttcaggctgcagtgaaatatgatcatgatactgcactccagcctgggtaacagagggaggccccgtctcaaaaaaaaaaaaaaaaaaaaagagaaaaagtaagaactttaagacatatttttaaaattcattaactatgcacagcccttaagggaaggaggacggattgcttccacattccacttcctaggtctggttgagaaaacatgttccccatctggagctcttaggaaggagtatagtaaatgcctcagttaataacatcctcctttttgaaagttgccttttctctccacccttgagtagatccggtatttgacgaaacttgtgaaagtgggtggaacctgtcttgccccctcttttctagaatgcactgtatatgcgactgtgactttcaaggaaatgtgtttgccatttgctgattttggggggaagttaatttctaacttcttccactggtaaatgaaggaaagtattgcaccttgcaaatgcaccaaatgaattgagttcaccattttaaaaaccgtcttttggccaggcggatctcattggaaaattattaaggggccaggcatggtggcttacacctgtaattccagcactttgggaggctgaggtgggtggatcacttgaggtcaggagttcgagactagcctggccagcatggtgaaaccccatctctactaaaaatacaaaaaattagctaggcgtgatggtgggcgcctgtaatcccagctactcgggaggctgaggcagtagaatctcttgaacctgggaggcggaggttgcagtgagctgagatcaagccattgcactccagcctcagcaacaagagcaaaactctgtctcaaaaataaataaataaattaattaagggctgggcacagtggctcatgcctgtaatctcagcactttgggaggctgaggctcaagaattgcttgagccaagggcaacatagtaagactccctctctataatttttttttgtttgtttaattagctgggcatggtggcccacactgtggtcctagctacttaggaggctgatgtgagaggatcatgtaagcccaggtggttgaggctgcaatgagctatgatcatgccattgcactccagcctgggcgacagagcaagattctatctcaaaaaaacaaacagaaacaaaaacaaaactctttttccccctgcccaaaacaaaaaataataataactttaagacagtgacagaagagcattaaaccaagattgggcctttcgaagtgtgtgttttgggggtgagggaagctgtgcgaccctgaagctggcattggggtttattccaggcataagacagggaggggagaggtgaggctggggcagggctggattgcacatggcctcctgggcttggggagaagccccagctttctcctgagggcactaggcagccatggccagtttgagctggggagggagagggtcagatttgtgctttaccgagatgggaggagacgagactgaggtagaaatgatggaggaggctggaaaaaaggggaaagtggagatagggaggggatgaaagggggtgaggaaggggaagaggagaatccaagtggtagaattcataggatgaagtgagtgaccaccacctgtggggagggaagggaggtatctggaggacaccagagaccctggagatgggcaggccgtgggtctctccctgagacaggggcggggggagggtcgggggagaggctgcagtctgggtagacacagggcatgtgaagttcggagatatccccaagatggtatccatgggagggcgtctaattccctcttcagctcagcctcagcacctgctctctcaccctgacagcagcccagttttcttttttgtttttttgtggttttttttttttgaaagatagggtctcactatattgcccaggctggtgttgaactgctgaactcaagcaatcctcccacctcacagcctcccaaagtgctgggattacaggtgagagccaccatgtctaatgtgttgctgggttttgtttgtttgttttgagacggaatctcgctctgtcgccaggctagggtgcagtggcgcgatcttggctcactgcaacttctgcctcccagtcaagtgattctcctgcctactctcctgagtagctggggctacaggcacgtgccaccatgcccggctaatttttgcatttttagtagagatggggtttcaccgtgttggccaggatggtctcttgaccttgtgatctgcctgccttggcctcccaaagtgctgagattataggtgtgagccactgtgcccagcagggctttttttttttttttttttttgatacagggtcttgcactgtctcccaggctggagtgctacggtgtgaacacagctcactacatcctcaacttcctgggatcaagcgatcctcccacttcagcctcccaagtacctgggactacaggcacccaccaccacacccagcttattgttttttattttttgtagagaagaggcctcattatgttgcccaggctggtcttgaactcctgggctcaatcgatcctcctgcctcagccttcaaaagtgctgggattacaggtgtgagccaccacgcccggccagctctgttttctgaacctccaaaaatggagcaaggcatgagggaacccacataatgcctgggccctggtgattctcccagggtccccaccctggctgatgctcacatacacatgcacactcatgcacacggcgcacacacacacacaaacactccctcaaaagcctacagctgttcacacactcacacaggcatgcgagcacagcactgtgtcctgtctcttcatgtctctagctggttgtttttctctccttttttttttttttttgagacggagtctcactctgtcgcccaggctgaagtacagtggcatgatctcatttcattgcaacctctgcctcccacgttcaagcgattctcctgcctc[135 bp omitted]tggcttcccaaagtgctaagattacaggcatgagccaccacgcacagtctatctctagctggttctgatgtctctccctctgtccctctgtcccagtctctctcctttccttcctccctcacctatcttgttttctcagtctctccctgtttcttttgcttctgctctctctgtctgtgtctctctctccctcaaaacatacatagtggtttataaggccaggcacagtggctcatgcctgtaatcccagcctgggtgacagagcaagactctgtctcaaaaacaatttaacaaaaacaaaaaagcaaacatacatagtggtttatagactaagaccgtagattcgcaatgggctttgccacttgctggtctcatcttcctcacctgtaaaatgaatctacaacccatctcataggattgcagtgagaattaaacgagccgatactctcaagcacctggcacagtgagtcctgagaatgtgtttgctgttgctataaagtctgtatatttaagatagcaagctgggtgtggtggcttacatctgtaatcccaacactttgggaggccaagtcaggaggatcgcttgagcccaggagttcaagaccagcctgggcaacatagtgagaccctgtctctaccagaaatacaaataaataggcagggcgaggtagctcacacctataatcccagcactttgggaggc[134 bp omitted]gtgctttggagaaaaatagcagggagtcgggaggggggtttggtctaggggcttctgtttttttgttttttgagagggaagtctcgctctgtcacccaggctgcagtgcaatggtgcgatcttggctcactgcaacctcagccccctgggtacaggcaattctcctgcctcagcctccagagtagctgggagtacaggtgtgtgctgccacacctggctaatttttgtaattttagtagagacggggttttgccatattggcca[259 bp omitted]taaaacaccatctctactaaaaatacaaaaaaattagctgggcgtggtggtgcatgcctgtaatcccagctactagggaggctgaggcaggaaaatcgcttgaacctgggaggcagaggttgcagtgagctgagattgtgccattccactccagcctgggcgacacagggagactgtctcaaaacaaaacaagacttgaaacaggcatgagaggcagctatgtggctgtgagagggagagcattccaggcagagggaagggcaagtgcaaaggccctgaggcaggaatgtacttgctgggttaagagacagcaagggggctggcgtggctggagtgggattagtgggagagccaggagtggggggagggtggcgggcagggcaggagatgaggtctgagaaggagagtagtgagggaaggggctgattgtgccgggttgtgggggctacagtgggattttggcatttgctctgcgtgagctgggagttgtgggaggattctgagcagagagaaggggagtgttccactgtataacatgggttgagcttgtgttacggccaggaacacactccccctgcagtctctctcctcagtgctcccacccccctaccacattcactcacccacctttgcaccgaacccctatagggcgggcacgaggaccaggagatgggtgtatggggctctggggtctaggagagcctgagcagggatctgggggacctcagtggggaggggctccatccaaacctcaagccccctcctgctgatggccctctgttatcccggtgggtgcaccctctccactccaccaacagcccaggcatggccttaactgcccctgccccccgcccctgtctgcttcccaaacactgagccatgggctaaaaggaactggaggatggtggggggcagcgcttccctgtcctggcatgggccccaaccctggcctcccacctcactcacctgcagctcctggaacagcaggttggccacgacacggtggcagagccgggtcacatggtccagagcactagcagatgcttcccgggccggctcgctttctgggggccccacccgggccaggcgctcggccagagctctgtggggatcaacagagccaaaactgagggaccccaacatctcagcccaactgcctaggcctgtcttcccttaggtagatcagaggggcacaggggtgacaggtcagatggggggctgagaaaggtcagggactctggagaggggtcaggggatgcttgacaggttgggggtgtctggggattggggtgtctggggacgtcaggggactcatggatgttggggggctgagggatggctaggaggtctagggtatattgggggagggaaggggggtctctctgtgtcttcgggtctcagtttctcttggtgctttctgggtgagagtgtggaggcctccattctaaaagtctgtggttcttttttttttttttgagacggagtctcgctctgtcacccaggctgcagtgcagtggtgccatcttggctcactgtaagttccgcctcccaggttcatgccattctcctgcctcggccttccgagtagctgggactacaggcgcccaccaccacacccagctaattttttgtatttttagtagagatggggtttcaccgtgttagccaggatggtctcgatctcctgaccttgtgatccacctgccttggcctcccaaagtgctgggattacaggcatgagccgccgcacccggccaagtctggggttctaatggtctacagctctgaaactgtacccttactcttctctttttttttttttttttttgagacacagttttgctcttgttgcccaggctggagtgcagtggcgcgatcttggctcattgcaacctcaacctcccaggttcaagtgagtctcctgcctcagtctcccaagtagctgagactacaggcacccgccaccacacctggctaatttttgtatttttagtagagacaggttttcaccatgttggtcaggctggtcttgaactcctggcctcaagagatctgcccaccttggcctcccaaagtgtgggattataggcatgggccactgcatcctgccccggccatttattatgattactattatttgtaatacaaatggtagaatagtatacccacttctgccctttccttcaacagcttggagacttttccgttagggcatgaagagttctcacgctcctttttaacatctgaactggattccactgcttagctgtcctatcatttatttaactggccctcgatagatggacagttggttccattttttccagggaggaaccctgcacatatgtcatatcccatgagcttttggcctctgaagggtgcattcctagaggatctgctgggtcaagcgcccagtgtttgtgatttgggcagaaagtgcttggtctggactgttctccattcggcaatggaagaacacagactgctacaatgataggaaatgggaatggccaggcaaggtggctcatgcttgtaatgccagcattttgggaagctgaggcaggagcatcacttgagcctgggagtccgagaccagcctgggcaacatagagagacctccatctcttttattttcttttttttgagatggagtctcgctctgtcacccaggctgcagtgcagtgacgggatcttggctcactgcaacctccacctcccaggttcaagcgattctcctgcctcagcttcctgagtagctgggattacaggcacctgccatcatgcccagctaatttttgtatttttttagagatggggttt[133 bp omitted]ttttttgagacggagtctcgctctgacgcccaggctggagtgtagtggcgcgatctcagctcgctgcaagctccgcctcccaggttcacgccattctcctgcctcagccttcggagtagctgggactacaggtgcccaccacc[171 bp omitted]taaactaatcaaaaaggataaaaaggcaaaaaaaaaatctgtcattcttttttttttgagacggagtcttgctctgtcttccaggctggagtgcagtggtgcgatcttggctcactgcaagctccgcctcccgggttctcaccattctcctgcctcagcctcccgagtagctgggactacaggtgcccgccaccatg[175 bp omitted]ggcgtctaggattctgtaattcgaacactccaatattcggatgctctgtggtgctatggctgtttcaaggactcccagattttatgcgtctaaggtcccatgctcagactcccctgagtcagttctgcaatccccacccaggatccgggcatcccaggtcagcttccaccttggattggtcctccctccatcacaccatggatgccctcacctcagtggggggccgcagttgaccagggcgatggtcttgctgatataggtgtcaggtagcatctcccggactgctgggttctcatggaatcgctccacacgctgctggaagctggtgggaggaaaggggacagatagggcgccactgggtcagggtccctcgtgggcacccagcctgccaaagccaccatccctgcggtggcactctacctgtcctcaggtgactccctctcatctctcctctctctattggatcccaggccctgatgcccaacccccagcagagctaacctgtgctcccaggttcccctacctctgcaggaactctgccagcccgcctaggcagcagtgggccatccgctccccaaactcctggctgatgcggggtgctcgctctgtgtgctcttccagcagctgtgaggtccagggcgacaagaagaggtgaggaggggcaaggtcccactttccatccagcccatcccccagcctccctccacctcctacctcacacacatcctgggccaggctgctgggctggtcctccaggctcccccagtgctcttcgtcctcctgcagcacacggagaagggcagcccgggtctgagcctacagtagggagaggggagacaggcaggagttgggggcggcctggaggtctttttttttatctctttctcccaccacaatcccctagcccttaaccccaagcagttctggattctacctatgagcttgtcaaggtgatgctggggagggaggctgagccagaaaacttctgcagcccttcccactcctaactctgtggtttggaacttcatattaaaagtctggtttggccaagcgcgatggctcacacatgtaatctctttgggaggctgaggttggcggatcacctaaggtcaacagttcaagaccagcctggccaacatggagaaaccccgtctctactaaaaatacaaaaattagctgggcgtggtggtgcgtgtctgtaatcccagctactcaggaggcagaggcaggagaattgcttcaacctgggagacagaggttgcagtgagtggagatcatgccattgcactcccgcctg[138 bp omitted]acggtgaaaccccgtctccactaaaaatacaaaaaattagccgggcgtggtggtgggcgcctgtagtcccagctactcaggaggctgaggcaggagaatggcgtgaacccgggagacggagcttgcagtgagccgagattgtgccactgcactccagcctgggcaacagagtgagactccatctcaaaaaaataaattaaaaaataataaataaatagataaaataaaattagtccatggttttaagcttcctccatctaataagcaagggcttaattgtgtgtgtgtgcacgtgtgtgtataattaaatatatacatatatttatgtattaaatatatacatatatttatgtattaaatatatacatatatttatgtattaaatatatacatatatttatgtattaaatatatacatatatttatgtattaaatatatacatatatttatgtattaaatatatgttatatatgtaatatatttatatattaaatattagtataagctatataatgtgtatattaataattcataatacgttatttatatattaataattagtatgtattatatactatagcacatgaaatatgtaatctatattaacatataaatattaaatataaatcaataatacatattataaataatatattataaataatatagatacatgtgaccaggtgcggtggcttatgcctgtaatcccagcactttgggaggccaagatgggcagatcacctgaggttgggagttcaagaccagcctgaacaacatgtagaaaccccttttctactaaaaatacaaaattagccgggcatggtggcgcatgcctgtaatcccagctacttgggaggctgaggcaggacaatcacttgaacccgggaggaggaggttgcggtgagccgagtttgtgccactgcactccagcctaggcaacaagagtgaaactccgtctcaaaatatatatatgtgtacattataaataaagctataatataatatattattgtatattatttataatatacacatttatatgttaatatgtatacacaaataatgtatacttaatatttatattaaatataaatcctattattacatattatgatatgtatgaagtattatttatattaaatattgtttttctttagaggccacgtcttgctctgtcccccaggctggtgtgcagtggtaccatcatggctcactgcagcctcacactcctggactcaatcctcccgcctcagattcttgagtagctgagactacaggcacgtgccaccacacccagctaactttt[136 bp omitted]ctgcctcagcctccagagtagctgggactataggcacccgccaccatgcccagctaattttt[166 bp omitted]caggctggtcttgaactcctggcctcaagaaatcctcccacctcagcctcccaaagtgctgggattacaggtgtgagccaccgcgcccggccaagggtctatgttttattgtcttttggtcccaagactctgctctcaggttctgccaaacagttagtttaagattctcagattctgtgtttcaagaactccaaaggctgggctgcaaaggttctcacatctctgattctctgatcaaatgtgttgtctcggctggggtgactcatgcttatactcctagagctttggaaggctgaggctggaggatcacttgaggccaggattttgagactagcctgggcaaaatggcaagaccctgtctctgcaaattttttttttttaaattatccaggcatggtggtgtgtgcctgtaatcccagctactcaggaggctgaggtgggaagatcccttgaacccaggagttcgaggctgtagtgagctgtaatcatgccactgcactccagcctgggcaaaagagggagacatctgtaattaaaaaaataaaaaagtataatcctcaatttgatgagtttaaggatccagatctcttttctatggttctaggctcttaagtagcattgactgatttctgtggctggaagtaggactggaattgagacagcaaacatcactgtagccggggacggcgtgcatggctgggccattctgctcagcggtgtctgtgcaggttcagtaattaaccatgtttattaccagccctgcttatatgtgaagatctttgtcagccaggcctgatggcacgtgcctatggtgccagctactggagaggctgaggcaggaggatcgcttgagtccaggaggtcaatgctccagcctggcaacagagcgagaccctgcctcaaaaaaaaaaaaaaaaaaaaaatctttgatgctatacttctgtgagtctttgggcctgtgagctgtagttctgtgactaactttcttgtactctaaggtttgaagtgtccagatatactgaacctttaccaagtgtctctgtacagcggcctttgtgtctatggcacatggatagaactcagaagttcgtaaagggaaaagggagttggaaagagtgaaaggtggaggggacaggcttcccaagcccactgtgaccccctccctccacagcacctcctgcttccaaaatgcaaagttccaggtaccttaacatctgtgacgcattcatcctccaaaccccgcagggtgccaggggagagaaggggccccagctccccattctccagggcggccatgtccaccagccctaggacctctctggggatgggggtgagagaaaaggaggtctgtgaaaagtggggctgggcagttggaaccttccccacaccctcctacccactgtttctgtgaccctgggccactcccttcctctctctaagtcatctctgctcatccctcagaggaagtctttggaattgttgcttccccggctccagctctctgagtcagctccctgatggatggtgtcccggcatgatatttaggggtcaagtccaggcttgaagatctgacatgcaaggcttcacccatgatccatttcaccagacagaagttccctttgcacctatgctctgaggccctgctgccttacctggccttggaggcttccccagtccagccctctctccccaccttctacgagcttacatgcctggagctatgtgatatcatcaatatccacccccaaacaccccagacttgggctcatggcatcctctcaattataaacaccattgccctacaaattggaccaaacccagttcccaccactttaggaagctttccggactccctatcctgcctccatcccttatagataacatgagagcattattgacatacattcccaaatgagatctatgtggtcaatgtgggtatctgttgccttcccagtcttccggtgacagcatcctgattttgttggaagaaccacccacccccttcactgtccaacgtgtggcttggatgtggctaactcccttttctctggggtagacaggtgacctggaggtggctaatcaccatagtccatcccccggccacaagaatgggtatgttttaggacacaaagtctcaacagtaataagattctaggactgagagggaccatggtactgaggttctgggtgctacccttatagaattcaaggggcaaacagcactcaagtcctaaaactggcccgggcatggtggctcacacctgtaatcgaagcactttgggaggccaaggtgggtggatcacttgaggtcaggagttcgacaccagcctggccaacatggtaaaaccccgcctctactaaaaatacaaaaaaattaggccgggcacagtggctcatgcgtgtaatcccaacactttgggagttcgaggcaagtggatcacctgaggttaggagttcaagaccagcctggccaacatggtgaaaccccgtctctactaaaaatacagaaattagctgtgcatgatggtgggcgcctgtaatcccagctactcgggaggctgaggcaggagaatcacttgaacccgggaggcggaggttgcagttggcagagattgcagcactgcactccagcttgggcgacagagcaagactccgtctcaaaataaataaataaataaataaataacgtcctaaaactagaaggatcaacagtgttgaggttctaagaccaaaagagggaatgaggctaaggtttaggattcaaagcttcattggtactaagcttctatggttgcaccatacattctaagttctaagattggaaacgtcaacagtactaatgccctaggctctaaagagaaagcagtgtaggattctagaattctaagtgtcattgtattaaggtgaagggtcagtggggctatggttctaggaaggaatggtcaacagtgctaaaactctaagactggaagggtgaacagctaagattctagtagcgtaagtgtcatgaagcccaggttcttggactggtgggcccaccgtgctgagctactaggattgaaactgtcgatagtgctaaaattgtagaactggaagagtcaatggtgccaataggttctaggtctgaaagggtgggaatgctaggattctaagactggaagcatcagtgttacttagatgctaggagtgtaactgtcgatgatgctaaggttgtatgtaggtctagaagaatgaatggtgttgagattttaggaacggaaaagtagcaacgcaaaggttctaggactagaggaatcaatggtgctaagattcggggactggaagggtggacagcgaggcgatctagagtgtaagtgttgacagagcgctgaggtttttggaccacagtggtgccggagctcttattctaggactgcaagcgtccatggtactaaggtgctggaaccggaagcctcggtagcagtgagagtctaggattgtaactgtcagcggtgctgacgactggatgggttaatggtgttaaagtgctaggactgtagggtcagctgtcccaaggtccttaaggtctgaagaagccagtgctagggggtagggctgagggtttcacgtgaccttgggcaactgagtccagcttacctggggtagacctgattgtgccagtgcagcagcgcgtagcggtcggccagcggcagcctgcgacgggcggaggcccccagccactcggccagggccccgtggtagccgcgcaggtagacgccgaaggcgcccaggccggcggggtaggcgggcgccaggcggccccgcaccacggccatatcctccagcagccgcgcccgcagcgcctccagctgcccggccaggcccccgggcgccccgggagccgctgcctctaggcgctcccgggccgcgcgcgccacggcttcggcccagcgtgcgcgtagtttgcgggccgccccgggaccccgacgcccgtcggccgcctcctcctgtaccagcacctggcccagctgcgccaccgcgccagccccggcgcacgctcccggcccggggcccgccagcgtctcgcgcaccagcgcccacagctcgcgctgcagggcctcgtacagcagcgccacgtcccgcgcccggcggcccccgccagcgccctcggccttgggaggcccaggcgcgccgcccctcgacggcgccagctcctcggcctctagctccaggatgtgctcgtccgcacgcgctagttcgcgctgctggatcaggctcaggatctccagcactgcgggagcaaagcgggaggtcagcagtgcgcgggggggaggagggcgatgccggacgcggggttgggggtgcttaggaaggggagagagatgaggggaaaagggttacaggaggcgggaaagtgtgggggcagagaagagcccggagaagagcaagaaagaaggatgttgagtgaaggatgtaggggaggggtcagggtgaggggctcatgcttgtaatcctagcactttgggaggccgaggccggcggatcacttgaggtcaggagttcaagaccagcctggccaacatggcaaaacctcgtctctactaaaaatacaaaaattagccaggcgtagtggcgtacacctataatcccagctactcgagaggcaggagaatcgcttgaacccggaaggcagaggttgcagtgagccgagatcgcgccactgcaccccagcctgggcaacatgttgagcgagactctatctcaaaaataaataaataaaaaagagagagggggaaaagaaaaatgcctgtgactgaggaggggatctggggaggttgcagggcggaaaaatggaggaggggtcggaggaggcgagaaggttgagagaggagccacgtaagggggagagagatggaggcagccggtgggagtaggaggggcagggtggtgacttggagatggggagaggatatgggaccactgatggggtctttttggggtggggatggctgtgggctgatctggccctctgatgagttcagactgcctcgagaaaggcgagtcgggctggaaggcctctgaggctgaaggagggtcctggcagcccagggttaccctcgacacctccacccccctccacttcctccctggcagagaaactatttcctggccagcgctatttctgcccatccgtttccagaaggcggggctctagtcaccccctcctcacctccctccagtgccctcccagtccccagggagctggggctgaaatagcctctggccagaacgtggagggcatcagaggacagaaaaggctctcctgaggtccccagccctggagcagttcgggcctcggggctaaaagccgggctcaggcacgggagcagagataaaggcagggttgggggtggcggtgaattaagatggggattgggacacggatggggatagggccggaggtgaggatggggtgaaggtgggggttgggatgagggagtttagggttaggatgaggtcaggtgggagtctggacagaaatgggaaagaggcaagaatgacattggggtctgggtagggatgaggttggagaggtgggggaggggaatgtaggtgaaagctgaggatggaaaggacataaagattgatgtgaaggccgagtgcggtggctcatgcctgtactcctagcactttggaaggtgggcggatcacctgaggtcaggagttcaagaccagactgaccaatatggtgaaacctggtctctactaaaaatacaaaaattagccaggcatggtggtgcattcctgtagtcccagctactcaggaggctgagacaggagaattgcttgaacccaggcggcgaaggctgcaatgaactgagatcttgccattgcactccagcctggatgacagagctagactccatctcaaaaaaaaaaaaaaaaaaaaaaaagattgatgtgagtttgaagatgaattgtggaagtgagttgggcttgggaataggaacatggatggaattgaaaatggaggttggggatgggggtttaggactgggactcaggataggggtgaagatagattagggatgaagaggaggttgcgtttggagttggaattgaaactgggggctgaggaagaactaggaactcaaataggactgaataaggaggttgatggccaggtgcggtgactcatgcttgtaatcccagcactttgggaggctgaggcgggtggatcacctgagatcaggagttcaagaccagcctggccaacatggcaaaaccccatctctacaaaaaatacaaaaaaaatttagccaggcatggatggtgatgcatgcctgtaatcccagctactcaggaggttgagacaggagaatcgcttgaacccaggaagcggaggttgcagtgagctgagattgtaccattgcactctagcctgggcaacagagtgagaccctgtctcaaaggaaaaaaaaaaaaaaaggaggtcgccagagggaaatgggtggaaggtgggtgctgagaggggcctggggttgggggttaagagtgagaccaaaagagtttaaaagggtggaaggtgaacatggggaagaatgggatatgaaacggggctggaccagttgggggttgccatggtgttggacatagacaatgacattaaagatggcgtttaggccaggcgcagtggctcatgcctgtcattccagcactttgagaagctgaggcaggaggattacttgaagccaggagttcaagaccaacttgagcaacatagcgagacccccatctctacaaaaaatgtgaaaattagccaggtgtgatcatatgtgcctgtagtcccagctactctggtggctaaggtgggaggattgcttgagcccaggaggtcagggctgcagagagccatgattgcaccactgcactctagcctctagcctgagtgatagagcgagaccttgtctccaaaactagatggcatttggaggaaaggatgagctgtacgagaagcatacggatgtgtctcagatagagactgatggtgggcttggaataagtgtggggtgagaacagaaaaggcactgaggaagacactggggcttggagtaggaatggggactgaggatgaagacagggtggtgttagggattgaattacgtccccccagaaaaaaaaaagatatgtgaagtcttcaccccagtacatcagaatgtcacctgatttggaaatagggtctttacagaggcaatcaaattaaagtgagatcatagggcagacccgaatcccatgtgagtggtgtcctcataaaaaggagaaattggccacacgccgtggctcaagcctgtaatcccaacattttgggaggacgaggcaggcagatcacttgaggtcaggagtttgagaccagcctggccaacatgatgaaaccttacctctactaaagtacaaaaattatccaggtggcacatgcctgtaatatcagctactcgggaggctgaggcaggagaattgtttgaaccccagaggcagaggatgcagtgagccaagattgcaccactgcactccagcctgggcgacagaggcaaaaaaataataataataaaataaataaaataaagaaattgaagaaattggggatagaaagagaagggggagagatgggaccaaaatcaggtattcccttggctttagacatgggagtagggctgaagacggcaggtggaggaggcaaagattgagggtgggcatatattaacaggtggcactgaagagaaaggttgacgacagggattaggactgcagtggtaatgggttggagctggcatggaggtgggagatgtgagttagacatgtgaattgcaggtcggggtcacaggtggtagctgggatgggcttaagtatgaagcctgggaccaccagggctggggatggacatgggcactgggattctcccaggacagggtcagggctccggactcacctgacaatggctccttcatctttgggggctctgggaccttgggtgggggctctggagctgcctcgcctgcaggcaccactctctcagccagggacgcacgctggggcttggatccacgccccagtctcaggaaggccagtctccgggcggcctcccccgctgcctcctcgtcgccgtgggctcgggtcccatgcagccgggccaggaggccaaaatctgctgagctcctgcgtatccctggtaccagcacacggcccaagaaagagcggggctgcccatccccagggctgcctgcccgccggcccggggcccagcccagccggaagggggccaggcccgcaagcttctccagggtggcgcggcggcgacaagatgttccattggggagggaccccagctccccggcctcttcttcctccagccctgaaacttcttcaaaggggttccgagaggacctcaggggcagggtccccgcccggggcaccttagggtctgacactcccagattcttcaggataggcattttgacaggtggggacctggggaaaaaaataatgaccatgggcgatgctgatgacaatggtggtatggatgacggtgcctctgtgtaccgagcactttggggtgagcgtaccagacacttgcctgagcacttaataagcccttgatct[135 bp omitted]tgcctca[222 bp omitted]tcacccaggctggagtgcagtggcacgatctcggctcactgcaacctccgcctcccaggttcaagcaagtctcctgcctcagcctccggagtagctgggactacaggcgcgcgccaccacacaaggctaagttttatatttttagtagatatgtggtttcaccatgttggccaggctggtcttgaactcctgactcaggcgatccacctacttcagcctcccaaagtgctgggattacaagagtgagccacctctgctggcctggaatattctctatcttaagttgatcctcctactccgtggagaaacaggctgagaggggggaaggctccctcccaagatgacacagtcagtcaagggcagagatgatatggggactcaggccctaccatccacccagacgtccagggcagactcctgagcacctgcctacaccccctcatccccttcatttctcctgtttgatttgtacccttgtcatctctccctcattcatctcttcagcaaaaacttattgggaaatgtctagaataggcaaagcctaattttttttttttttttttttgagactgggactcaccctgtcacccaggctggagtgcaatggccccatcatagttcactgcagcctgaaactcctgggctcaaatgatcctcgtacctcagcctcctcagcagctgggactacaggtgtgtaccaccatgcccacttaattaattaattaatttatttatttatttattgagacagggtcttgctatgttgcccaggctggtctcaaactcctggcctcaagggatctatccacttctgcctcccaaagtgctgggattacaggtgcaaatcacctcgcaggtctctaggcaaatccttagagacagaaaggagactgacaataggactggagagaacggggaatggcgagtggctgctaatggatgcagggtttccttttggggaaaggaagacactctggaactagataaaggtgatggttgtacaacactgtgaatgcattaagtgccacttaattgtatgcttttaaaatggcttaaggccaggcgtggtcgctcatgcctgtaatcccagcactttgggaggtggaggcaggcagatcacctgaggtcaggagttcgagaccagcttggccaacatggtgaaaccccgtctctactaaaaataaaaaaagtaaaaaattagccgggcgtggtggcatgcacctgtaatcccagctactcgggaggctgaggcaggagaattgtttgaacccaggaggcagaagttgcggtgagctgagatcacaccaccgcattctggcctgggcaatagagcaagactcagtctcaaaaaataaaataaaacaaaacaacttactaggtattagccatgggcccagccctgtgcaggcgttagggacacagcagtggccagggcagcccccatccctgccattacagcttcctgagtcctgcccattccatctcctaagcctctcttcagtctgcgctccctcctttcactcacttcccatagcccctaccccaagcggaacccttgcccacttccctgccctggcctcctccctggtccccagcctctagtcttggcacc[145 bp omitted]aaaaatacaaaaaattagctgggtgcagtggcaggcgcctgtagccccagctactcgggaggc[137 bp omitted]cctgctcttctccatctcctaagccttccatggctccctagtatcttcaggacaaagctgaggcctctcaccacagccttcatgctctggcagctgcacacgtcactagtgctgtcccgtagcctcctccttaccccaggaacctccaggtttcagcatctgctggtgcttctacatagacgcctgttctccatgctccagtcaggacttcaggactcacacttcaggactcagccccatgccccctcctccaggaagccctctgtgaccctcaggctcccagtccctgggttcccacacctcacctctgcctgctctgggtcatccctgtctggggacagatctgtgtcccttactggactgcaaacctcagcaggacagggctggggctgtctcagtcaccactgtgtccccagctcccagcacagggcagacactcagggaatgggtgctaaacaggaaatgaaggaaggaaagtggcaagacagttcattccttgtgtggggaggaggagggtgagtcgagctggaagaggtcactagggagcaggccacgcagggctttaagttccttgataagggacaggctttcttccaagagccctgcagagccacagataggtgctttttaaaacaatgaaatagttcaaacattcggaaaagtacagaagacaagcttaataaacacttctgtgcctacaatcctagccacagctcacacaatcatttgctctcttagttcaggtttttgttgttgcttttgtctttagagacaggatctcactctgttgcccaggctggagtgcagaggcgtgatcatggctggctgcagccttgaactcctgggctcaagcgatcctcccacctcagcctcccaagcaacggggacatcctgctaattttattgtttaattttttgttatagatggggtctcgctatattgcccatgctggtctggaactcctgctcctggcctcaagcaatcctccctcctcggcctcccaaagtactagaattacaggcgtgagccaccatccactgccctgatttttgttttaaagaacaagccaggcgcagtggctcacgcctataatcccagcactttgggaggccgaggagggaggatcacctgaggtcaggagtttgagacaaacctggcaaacatggtgaaaccctgcctctactaaaaacacaaaaattagctgggtgtggtggcgggtgcctgtagtcctagctacttgggaggttgaggcaggagaatcacttgaacccaggaggcggatgctgcagtgagcccagactgtgccactgcactccagcctaggcaacagagcgaaactccatctcaaaaaaaaaaaaaaaaaaaaagaattacaaatgcgtgcagcctcctcctgccacctctcctggtcccactcgctctggccttctcctaaggaatccagcatccagaatgaatgtgctgtttacccgtccaagtagatttttatcccatgctccatagacttgtatccagaaataatatactgttctacatggtttcaaactctctataaatggtatcatactatttgtatcttgcaacttgctttaaaatttatttttttgctcacgttatgaacttgtgagaatttatccatgtctagccatacagctccagttcatttaagtgctatgtaatattccactatatgaattgtgtaaagggtcagatgttcacttgttcttctattgctggacgtgtagcttgtttgtcaccacgacagggttctgagcaggtcaggacagggtcaggattatgcagacgtgcgggggtggacaggaggcctgggaagagggtggtgtgcaaaaggcctgggttgcctaggttatgagtaagagcacccctttccatgatggggaggccccttctttctttccctgtttcaacccctgagctgctgcttctcaaccctccagttcctagaaacgctctcggacctccttccggtctccatgggcccccgcccccacaggaggcagtcaccatgacgaccccttgcctggagcccccatggctgtgtgcaatagatactcccccatgcacacacattatttgcacactcatttctcttctattttattttattttttcagatggagtctcgctctgtcacccaggctggagtgcaatggcgcgatttcagctcactgcacctccacctccagggttcaagcgatttctcctgcctcagcctcccaagtagctgggactacaggtgcccaccaccacgcctggctaatttttgtatttttagtacagatggggtttcaccatattggccaggctggtctcgaactcctgaccttgtgatccgcctgtttcagcctcccaaagtgctgggattacaggtgtgagccaccgcactctgtccttctcttttattttttagacagtctcactctgtcacccaggttggagtgcagtggcatggtctcggctcactgcaacctctgcttcccaggctcaagcaatcctcccacctcaacctcccgagtagctgggagtacaagtgcaagtcaccacacctggctaatttttgtatttttagtagagatgaggtttcgccctgttgcccaggttggtcaactcctgagttcaagcgatccacctgccccagcctcccaaagtgctgggattacagtcatgagccaccacacccagccttgatttctctttcatcctctgaactggcatccacatgcctcatcccaaaatggctccatcatcccccctccaccccataactgtctccatcttcctctcaaaatttcaggctcgaatttccctccaattgaagtcaaccttgcccggactacatctgactttcccccacctggcttcaatatcgcctccaaactggatccaacatccccaaacctggctgcaacattttcccaaaactgtctccgacgtctttccccttcctggctccaacacccgcctctgcaaactggtgctgacatcctgccccctccaaccctctgtctgcctcccagtgcccagcccctgactcacttccgaggcatccctcaagcccccagcctctcaggcccgcaggatgtcttggccaccagagcttccctctttgagcccctcctcctcttcctcactgccagccttttccccggagtccctaaccttctgcagcggccctgacctcggtttgcggaatccatcacctccaacgctcagcatctgtattagagaacggtctttccatatggcatgtccccaagcccaaccccaaccagtgcaaccccaatctagtccttgaccccaaacacaatcctgtcatcagcccagaccactgcaagctcatccacatctccaatcccaacctgatctcggtctctcctgcttgatctcaatccctacctggtccctgtctcccatctccgagaccccatctcttgggatagaacaaatacccgatccttcctggcctcagtcttcccgcccagactcgcaggacattcgacccaatgtcatctcatctctattctcctttggtggcaccaaggtttctaatgctcccttgcaccctttgtggaccccgcgagtcctcaaattctcccctgcaccctcctctcattttcatctcctttctgccttctcgccagcacccctctggagtcaggccccagattctctctttgcccccagcctctgctgggttcaaggtacaggttctcatcagctctggtccagtgcaactaagggcaactgttttcccagttgccctggggaagggggaccccttccccctgtccccagcacactcacctctgtcctcctgcccgtccttctgttcccgctgctgtcctgtccccaggctacttcagccaggactgctgggagcttggatctgagttgggggggtgctcggaggaggacaatttcctgtcaggaaacccctccctctctggggccaggggcgggaaggactcattatctgtctgcccttttaggccaggctgcggttgggctgggaaggccgaggcccacagctgggcccccaccctcacccccgctccaggccggaatccgcccactcctgcatgctcttcacgcctcccaaggtgacaacaccatcctgggcgccccggggagacaccccaagctggacgccagcccagagctgctctccagcatgggcaagccccgaggccttagaatgagaaccggggggcaggcacgcatctctctagagttccctgccacgggctgaagaccaggagggaagttttgctgggcccaggggctggggagggggacctatggaggagggcactggacatggctttggaattgtggttctctttgtctagaagcccctgtacccaggtctctgcatgaggccctccttttcatcatcccagttccagccccacagtctcttcctctgttctccactgtcccgtctcacagagtcgtcactctgctttgtcaatttatttttctttttttttttcctgagacagagtcttgctctgttgcccaggctggagtgcagtggcgtaacaatagcttactgcagcctggatctcccagactcaagagatcctcccacctcagcttcctgagtagctgggactacaggcatgcaccaccatgcccagctaatttttgtattttttgtagagacacgggtctcattaggttctccaggctggtctcaaactcctggcctcaagccatcctcctgcctcggcttcccaaagtgctgggattacaggcgtaagccactgtgcccagcctgtcaatttctttattgcaccttctacaatctgaaattatcagatgcaactggattccttgcagataaactcagcaaagctcactttgttgatcctgttcatctttataagcctagctgcgtgcctggccctcagtagtcaagatttaaatgaatttaaatgaagctgagggttggaggtgggtttggagatggacttcctgctagagttgggatgccaagtgaagtgagggctggggctggagctggtgctgggtggggttgggtatgagagtcagggttactttaaaaggctagggccatgtgtggtggctcatgcctgtaattccagcactttgggagccaaggcagggggattgcttgagcccaggagatcaagaccagcctgataatatagcaagaccccgtctctacaaaaaaaaaaatttttttaattagccaagtgtggtggcacgctgtagtcctagttactaagggagctgaagtgggaggatcacttgatcctgggaggtggaggctgcagtgagccatgatctcgccactgcgctccagcctgggtgacagagagagaccctgtctcaaaaattaagaaaaaaaaaattttttttaaataaataaaactgggctggttgcagtggcttatgcctataatcccagcactttgggaggccaaggtgggtggatcgcttgaggtcagaagtttgagaccagcctggccaaactgatgaaaccctgcctctactaaaaacacaaaaattagccaggtgtggtggtgcatacctgtaatcccagctactcgggaggctgagacggaagaaatcgattgaacccaggaggcagaggttgcggtgagccgagattgtgccactgcactctccggcctgtgagacagagtgagactccatctcaaataaacaaacaaacaaataaataaataagataaactgtgttcaagtgctcaggcacagcctgagggggatgcgtgatcactggcctaggcaaagtccaggctgggatcagggttggggtcaacattaggatcgggggctgggcttagggatcacagctccctcctggatccaagggttaagattcaaaggtctgaatgccccagttgaaggaatgaattcaccagacataggttgtggaggaagggctagctggatgaccaggtcgggaggcagaggaacaggccttgccccccagctcggcctctgcaccgcggacccatggtcagcagtggcccatcatgtactgggatcgtgcaggatttccaccccgccttatttatttatttatttatttatttatttagagacggagtcttgctctgtcgccaggctggagtgcagtggcgtgatctctgctcactgcaacctccgcctcctgggttcaagcaattcttctgcctcagcctcccgagtagctgggacgcaggcgcttgccacctgcaagcgcccggctaattttttgtattttttttagtagagacaggttttcactgtgttagccaggatgatctcgatctcctgacctcgtgatctgcccgcctcggcctcccaaagggctgggattacaggcgtgagccaccgtgcccgtccccctcctttttaaaaattattttttttattttgatttagagacagggtctcactatgttgcccaggctggtctcgaactcctgggctcaagtgatcctcccgttctggcctcccaaagtacggggattacaggtgtgagtcaccgcgtccagccccctttttaaattttattattattttttattgaaatacaattcacatacataagagtcacccttttcaaacagagtccggtaggttttagtatattcacaaggttgcagcaagcgtcaccactatttaattccagaacattctcatcaccccaaaaagaaacctggtacccatcagcagtcatttctcattccccagcctccaacccctggcaaccattaatctactttctgtctatggatttgccaattctgaatatttcatatgaatggaagcatacagtaagtggtcttttgcgtctgacttctttcgctaaacatgctgttttctttttttcttttttgagacggattctcactctgccgcccaggctggagtgcagtggcgcgatctcagctcactgccagctccgcttcccgggttcacgccattctcctgcctc[212 bp omitted]ctgtaagcctcggtccccccacatctgggaaatggggtggggacgctgttggggaagggagggcaggggtggaccctggagtgtgtggggcgcgtgtagggaggtgatcggctgcccccgtgtggtgcacggtagaactgcagctctcagcgccaatgcagggaacgggttgggggcgctcagcccctctagcctacccccaagacccccactttcaccctgcggcgtccctgggatcacagtacgtctagaacactaccccggaactccaccctctctgccactgtccctgaggctcctcgggccatatttgccaaatagtaataataatgtccccacatatgaattttgaatctggtcccctgtgaagcactttactcaaagattctcatttatttgttagcagtaacattaaaataacaaataaatataaacaaattgacaaataaaaatagtagcagcctgaggttgctgctattatttttcggagacaggaaaccacagtggttgagagagggtccaagttctggaacttgggagcacttggattcaaattgtagccctgccactaatttgccgtgtgaccttcagcgtgtgacgtttctcccttccttgggcctctgtttcctcatctgcaaatgggattgataaagatgctccctacctcttggggtggcagaaaggagaaactgctcagagcctggcacaagggcaactgccatgagtctgtgttgctcatagtatcaagcagtgctgtgctttcacaaccagcttttggctgagtgcagggtagtcccagcactttaggaggccgaagtgggaggatcgcctgagcctgagagttggagatcagcctgggcaatatggctacaaaaaattagctgggcgtggtggtgcacacctgtagtcccagtgacttggtggggctgagctgggaggattgcttgagccggggatgtccaggctgcggtgagccataatcgtgccactgcactctagcctgggtaatgcagtgagaccctgtctcaaaaacaaaacaaagcaaagcaaaacaaaacacccccagctctctgcaggtgggggtgtggagccttaatttgtagcatttgccaatttccatggtgtaaatattcccaccatggctaatttcaagctaccaaggtgatatcacatggcatttttgccccccattatatagtaattttactgtgcagctacaatagacgtaggtaacctcaagatcacagataatggcaaatgtagtaagataactaggacgtgatgagtatgtattacttgtacctttaatgtaatttaattgtatgtttgcataatttaatttttaataatggctgtgtttaacaaccagttccaaaattcctgagacataacaatcagctcgctccagccagatccagcacactgctgttttagaaggggaaactgaggctcaggaaaataagcctcagatagaagaaggcagggcacagaccccttcccaaaaccatgtgactcccaggccaagactatgtaatgcctgtctttctttcatcccaccctggtccacagagcatggatggtccccacagcgctgtgtggcctccgagaggctcttgtcctctctggtctcagcctgcccgcatggggagtggctgtgccctgcaggcgaatacctgcacagggttccttcgcacctgccagtgagcaacacacggattcttcctttcactttacaaactgggaaagtgaagcccagaaagggcaagtgcttgccccgggtcatacaggtggacagagagggtccccacaccccagctggggtgcaaaggagtggatgctgcagccccaacctgcgggtctggatctatgtggctgagtggaggcagcctgactagggaggtcactgagccctcagcagtggccaagccccgcacaccatccccttcacccaccccacccttaggcctccgaggggagagcttcccccgctcccccccgccaactggggagagaatgggccagggggagggacaatgtgggcagcgcctctggggtcttctctggctcagtccctttatctctatctcttcacagatctctgcgtctctgtatctctttgtctctccctgtgtgtgtgtggggtctctctcagtctttgtccctctgcgtctctgggtctctctgtctctgtctccctgcgtctctctctctctgtcatctggctcttccttcatctccttgcgcctctccacccttttgtaactcgtctctctctcttcgtgtctctctatctctacgtctctcgatctctctctctgcgtctctggcgctctgccccggcctctctctccccttctctcctctccagtgcgcctctcgtctcgggcgagaacacgctccccgccggcgtgcccagacccgcctccgcccccggagcccccggagcccccggcgccccgaccagcccgggcctgcgcctttaagggccggcggcggggggcggggtcccggcgccccgccctgcccgcccctccccctgacgtcccttcctccctccccagcccctccaccgcctccctccgccgccgcttgggccggctccgcgccccctccgcggcccccgcccgcccgcctgcccgccgcccccatggcgcccggggtccccgctgcacggggccactaggaccctcggcgtcccttcccctcccccgccctgccccctctcccgccgcgcggacccgggcgttctcggcgcccagcttttgagctcgcgtccccaggccggcggggggggaggggaagagaggggaccctgggacccccgccccccccacccggccgcccctgccccccgggacccggagaagatgtcttcgcggacggtgctggccccgggcaacgatcggaactcggacacggtgagtggggcccggccccttggggagccctggctgggtccagccgccaaacccttctccccgttgtacccctcgccccgcgagcccctaccctcgtttcctgggcccgacccggctcgtcacctctcgacccctcccggacttccaggcctctccaccctccccaccttttccagcccagcccgacccctgggggcgcccctctctcgggacccctctcttgtccccgtgcagaccgcttccgctcgggtctgttccctccaggaagccccttcccctgcttccaggagcccctcccttctcttgcctgtgctaagccgtttcccctccaggccgtccgcgtccgacacctcgccccctcccggatttgcagggcccctgaccccccaaggcccggccctggcactctcagcagggcctggcccagtcctgcctctggctccggccttccctgtctggggctgggtgccggctccccaggagcccccctcctcttattcccagccctctgcccctccaggacgcacccagggcgcctgtgggcagcccctggcaggaagctggtttccacctctcctgggccccggcccttttctggcttcttcaaggtctctcccgtcccaggcctggtccccatcttccaagcagccctgtccctagatcccagcaccccggggcccccagatgccacctggaccctttctggtctcttcctctcccaggaagccttggcctccaacttctaggccctcacctcacccaggctggtatttctaggccctggaccagtctgactccaggcctcatccgccctctatcaacttctcagcttcaggcagccccttccccaacccccaacctctggaccccctgctaggccaaactcagaccccttccccacaaaccaccgtcctttctcctgccccagggcctcccccttccttgctgggagtctggccttccaaggaagccccctcctcagcttcagaggccttcctcagctacagggcctggccccagatccttcttccagaaaactcctggacctgaagcctctcgtcttgccctggtttcaagcccttttcccttgggtcaatctgctggaagctttctccccaaatttctagaccccttgaccttccccagggctcagcctttattcatctgggctgctccttgcccaagaagttcctaccccatacttccaggccccccagacccttctctggtttcaaggacttctcctagaagcccccttctctgattcctaggagcttccccaagacccagggattcctggcctctgacttccactgcccccatggctttgtcactttccaccattcccaggcgccccctgcccctacactgcttcccagagaggcccctccccatctcctgtgtctctgatcactgatcacttccaaagacctgcccaccacccaatcctagacttctccccacctgggatctttgtggctttctccaaatccttctgccaggtccctgttccccttccccctgtttccctcacctccgacagacccccccacacacacacaccatcagagagatttatatctgtcccttcctcatcttgcagatccctccctcacagagaccaccccgcatcatcactatgggccagaactccaatttggagtctaatgaaatgcctaccacctctgttccttggtcactacaatctacagtgaggtgccaggggctccacagtcctgggttccaatgctgacatggccagctggtttgccttgtgtcctcagacaaccagttctccctttctgagcctcagtttcctgccctggaaaataggggtgaccgcttgagtgcctccaaggcttactcgattcaggcgaaggctggcacctaggaagcactccacaaatgccagctgctattgtggctgtgggtatgagtcagacagcccgtggattctcagctcagggctgttattggttgttgagtgagcctgcagattcactcccagcttgcagcctcagtttccttatctctaaatcgggttgatgatggccccccactgttagggatgtttgcaggagccagcgacgtgatgtgactaaggtgcacagggcctggcatgtgtcgtggctgttgtggttattagcactactttaattgttcagataaacttgggttcacatcctgtttctgtccctccctagctgtgtgacctcgggcaagtaaccttacctctctgagccttggtttccttgtctgttaagtggaacgcctaatgaagacttgctgttccctgggttgttaagatgcgtgcatggtgcggatttgaggatggctaatccccttttctctcctccaactcttgtcactaagacctgcctgtcagtcctggtggggagtcacttgcctgcctctggaatgggaggttgcagccccctctcctgttacctggttaccatggctacagccacgtggggtcatgctcccccaccccaagttccagggccccccaccagggggccagcctccccaggttccctagcaacagtcccgggtgttggggcgccagccgggcgggagggagccaggccagctggtggtgcaggccaattttagctcccacccccggcccccaggggctttgtcacccactgccccagctgcccctcgcaggggtccctcagccatgctgccttcagcgtggtgccatcccacctccagctggctgccctggcgccacctgacagggcttcttctccaggtccttatcttggtggggatcggaggccttatctccaggatctccacctgcctccctggtctctcctgggaagaagcctgggcctgtggggaagcctggctcagcactcaggaggaatcagcaggccggggttcgcatcccagcactctgctccatctgccctgtgaccttgggggagggactccccctgcctgagcctgggtgtccccgtctgaagactgcagatcataattggacccacattggaggccagggtgagggcacggcaggcagtggcggacgcgtggttagagccctggccgtggtggttggaactgcccagctgtggggaggttgtctttctgcccctgtgaatggactgtgtgaccttcacatggcaccttccctctccaaggctcagtttctctgctggaacatggagtcattccctgggctactgcaggaattaagtgtaggcgagttacctgtttacacaggacttggtccatagcatgagctgctttgtagaaatggttcatgacccagcgtggtagctcacacctataatcccagaactttgggagacccaggcaggaggatggcttgagcctgggagctgaagactagcccggacaacatagcaagactccatctctacaaaaaaatttaaaaatcagctgtgtgtggtggtgcactcctgtggtcccagctactcaggagcctgagatgggaggatttgcttgaacccaggcagttgaggctccagtgagccttgattacaccactgcacttcagcctgggtaacagagcaaggccctgtctcaaaaaaaaaaaaaaggttcaggtgtgagaggcagtgtggtattgtg[132 bp omitted]tgaaaccccctctttactaaaaatacaaaaattagacggttgtggtggcgggcgtctgtaatcccagccactcgggaggctgaggcaggagaattgcttgaacccaggaggtggaggttgcagtgagttgagatcgtgccattgcactccagcctgggcaacaagagtgaaactctgccaaaaaaaaaaaaaaaaaaaaaaaatactggtggaaactgtttgggttcagatcgtgggtccgggtctcactttccccacctgtaaaatggagataatagtgtggtaatggcctcatattgcatcaatgaccagcattaattaaacgttagttgtcgttgctatcaagtggcccggcagtgtctttctcagagacttgggcccccagcccatcagcctcttggcctttcttcctcccctcctgttgtcctcctgcttcccactcccagccggaagggcacaggcagaactgccttggcgggaggcctcaggcaccctgagccccagccctgaaagggagacagtccctggggcttccaatcaggccagggcagctcagagcaggcaggtgacctgcgggggagagaggccagggagggacaggacagtaggaacagaacatcaggaggagagaagccatggtgtgggagacagcaagtcagggcgcttctcaagccctgggtgtttcagggggtggcagaagcaacagtgtttcccatggaaggaggataacagggattcaaccaggtctcagggccagtgaaagacttggttaccctgcagggggtggtggctcaggcctgtaatgccagcactttgggaggccgaggtgggtggatcacctgaggtcaggagttcaagaccaacctggccaacatgatgaaacctcgtctctactaaaaatacaaaattaaccaggtgtggtggcacatgcctgtaatcccagctactcgggaaagctgaggcaggagaatcgcttgaacccaggaggcagaggttgcagtgagccagactgggccactgcactccagcttgggcaacaagagtgaaactctgtgtcaaaaagaaaaaaaataagacttggttacaatgtttggagtccaatctggggtaacagtgattggaatcaaatgttaggggcattccactgggaatcaaatgttgacatttgggtttgaagtagaatttgggggctggagaggggacagttgatgggtaaaatagcaagtcaggaccagtggtggtggaggaggagcctcgagtccagattgaggtcagcgttgattggggttgagggcagcctcatttagggcaaaatattgtagagttgatccaggctccaggacaggcatatcctgctttttcgcactttgccttattgagcttcacagatacagtgttttctacaaattgaaggtttctgacgaccctgtgttgagcaagcctgtaggctccatttttccaacagcctgtgcacaatttgtgtctctgtcacattttggtaattcacacagtatttcaaactttttcatcattattataatagctgttatggtgatctgatatcagtgatgtttttcctcttttttttttagagacagggtcttgctctgttgcccaggctggagtgcagtggcatgatcatagctcactgcagccttaacctcctggggctcaagcgatcttcccatctcagccccctgagtagctgggactataggcatatgccaccatgcctagctaattttttttttttaagtttttctagagatgggtgtctcgcttcattgcccaggctggtctcaaactccctggcttcaagcgatcctcccgccttgtcaatgattttgttttattgtgattcactgaaggttcagatgattgttagcatcttttaacaagaaagtattataaaattaaagtatgtacattgtttttatagctgtaatgctattattgcacactcagtagactgcagtatgatgtaaacacaatttttctttctcttttttttttttttttttgagatggagtcccactctgtcacccagactgtagtgcagtggcgcgatctcagctcactgcaacctctgcctccctggttcaagtgattctcctgcctcagcctcctgagtagctgggattacaggtgcgcgtcaccatgtccggctaatttttgtatttttagtagagacggggtttccccg[194 bp omitted]tcctgggttcatgccattctcctgcctcagcctcccaagtagctgggactacaggcgcatactgccacgcctggctaattttttgtatttttagtagagatggggtttcaccttgttagccaggatggtctcaatctcctgacctcgtgatctgcccgcctcggcctcccaaagtgctggaattacaggtgtgagccaccatgcctggccttttttttttttttttagaccaagtctcactctatcactctggctagagtgcagtagagcgatctcggctcactacaacctctgcctcccaggttcaagtgattctcctgcctcagcctccagagtagctgggattacaggcgtgtgccaatgcctggctaatttttgtatttttttagtagagatggggttttcaccatattggccaggctggtctcgaactcctgacctcatgatccacccacctcagcctcccaaagtgctgggattacaggcctgagccactgcacctggccacctggcccataatttttatatgcactgggaatccaaaagattcatgtgcattgcttttttgcagtatttgctttattgcggtggtctggaaccaaacttgcgatatctctgaggtatgtgtgtaattagaaaaggaggttggggctggatgcggtggctcacatctgtaatccgtacagccgaggcaggtggatcacctgagtcaggggtttgagaccagcttagtcaacatggtgaaaccccgtctctactaaaaatacagaaattagccaggcatgatggtgcacgcctgtaatcccagctgctcgggaggctgaggcaggaaaatggcttgaacccgggaggcagaggttgcagtgagctgagatcgtgccactgcactccagcctgggtgacagaggaagactccatccgaaggaaaaaaaaaaagacaaggaggttgggggtagtcagactgcagtgagggttgaagaaggggtgtgatgcctggggccctgaatgttgcagatttggaggacatgggggcttttgttcctggaggcgtctttttgtagagaaagatgaaggatgcttggctctctggggcctgagtttgaaaagggccacggaggggccggtagccaggcctcaagttaagtgcactagcccacgggttccacggaaggtgggattggatagctcatgctccatctcccccgcccagcatggcaccttgggcagtggccgctcctcggacaaaggcccgtcctggtccagccgctcactgggtgcccgttgccggaactccatcgcctcctgtcccgaggagcagccccacgtgggcaactaccgcctgctgaggaccattgggaagggcaactttgccaaagtcaagctggctcggcacatcctcactggtcgggaggtgagtatgggcacagggtggggctcggggcaggtccctgtgggaccaggtcttcggtgtatgttgatagaggtcaggattggccctgggtttgctttgtggcctcaggtaagttcccgactctctatgggacaggtcacaatatctctgatgttcccagaaccacccccatgggaaaagagaactaatttcatgtatccctgaaattgccgggaaatctcagatcacaggcagtccaatgtgtgcgttgctaaggatgcatgtggcttttgtagataaacctgagctgtggccggatgcattggctcacacgtgtaatcccagcactttgaaaggccaaggcaggaggattccttgagctcaggagtttgagaccagcctgggcaacatagcaacactttgtctccactaaaaaataagtaaaattttttaaaaattagctgggtgcggtggtgtgtgcctgtggtcccagctacttgggaggctgaggcgggaggatcgcttgagctcaggagtttgaggctgcggtgaggtgtgacctcaccactgcactccagcctgggtaacagagtgagaccctatctcaaaaaataaaaataaaataaaataaaagagggctgggcatggtggcttacgcctgtaatcccagtactttgggaagctgaggcaggtggattgcttgaggtcaggagttcgagaccagcctgaccaacatgatgaaaccctgtctctattaaaaatacaaaaattagctgggcgtggtggcacatgcctataatctcagctgctcagtaggctgagccaggagaatcgcttgaacccaggaggcggaggtttcagtgagccgagatcatgccactgcactccagcctgggtgacagagtgagactctgtctcaaaaaaataaaaaaattaaaaggccgtgcgcggtggctcactcctatagtcccagcactttgggaggccaaggcaagtggatcacctgaggtcaggagttcaagaccagcctggccaacatggtaaaaccccgtctctactaaaaatataaagattagcttggtgtgatagcaggcacctgtaatttcagctacttgggaggctgaggcaggagaattgcttgagcccaggaggcagaggttgcaatgagccaagatggtgccactgtattccgcctgggcaacaagaccgagactttgtctcaaaaaaaaaaaaaaaaaattggccgagtgcagtggctcataccaacaaacacagcgctttgggaggccgaggcaggtggatcacctgaggtcaggagttcgagaccagcctggccaacatggcaaaaccccatctttactgaaaaaaaaatacaaaaattagctgggtgtggtggtgcgtgcctgtaagcccagctacctggaaggctgaggcaggagaatcactggaacccaggaggcgaaggccgcagtgagccgagattgtgccactgcactccagcctgggtgacagagcaagaccatctcaaaaaataaataaataaataaataaatagtaaataaattaaaaataaaaaataaataaacctgagctgcctctctgttttaagggtggactttggttccttgaaatcttcctgtgatctggagaacacagcaggtttatttatgttgtattctcagttacacacagcctcactctccccaccacctcttccagagcaggcatctgtgctgagtatggtgacattattgcaaaaagggcccacacaggctttgcagcctagatatgaggtctctaactcacttagaggaaaaggaatggtgggtgatttcatgatttccccacccctccttcaacttcagagaaatgattggaatgaattatcctgccttggatggactctcccctgccctcacgctgtctacaccatacacgcaaaagacaccgggccccgatggtcttacaggcaaatcctaccagatgttcacattttatgccagttcttccagagactaaagaaagaactgccactgcctgactgatttttacgcgctagtttgtccttaagagcaaaaccagacaagaaacaaaattacaggccaatctggtgaacataggtataaaaatcttatacaaaatattaacaaacagaacctggcaaatcaattaaagaaagctgtgtgatgacgaaactggctttatctcaggaatgcaaagttcttttccctttgacaatttattcatgtacttcaccacattctcagattaaagaagagaaaccatatgatcgtctcaatactggcataaaaagtgtttgataaaatttttaaaaacacattcgtgagaatatgaggaaagctaaggggctctctcttccatgaagaacacatggttccctatatgtggatctggttccaggggtttctgagagggacctggccccatctctgttttaaaaataaaataaaagttttactgcagactgggtgcggtggctcatgcctgtaatcccagcaccttgggaggctcaggcaggcggatcacctgatgttgggcgttcaagaccagcttggccaacatggagaaaccccgtctctactaaaaatacaaaattagccaggcatggtgacgcatgcctgtaatcccagatattcgggaggctgaggcaggagaatcccttgaacctgagaggtggaggtcgcggtgagccaagattgcgccattgcactccagcctgagcaacaagagggaaactctgtctcaaaaaaaaaaaaagtttcactgcaaaagaagtataaggagagttcaatgacattctgatttcctccccatgatgtatctcaaagctgttttaaaagttgtgtttaagaggtagattccatcaggctgcataagttcaaatctgggccacaacttactacaatttactagccatgtaactttggccaaatgactaaacagctctgtgcctcagtttccctgttggtaaaatgatgataatcctgttagccaaatgttggtggcatgtgcctgtggtcccagctacttgggaggctgaggtgggaggatcacttgagcccaggaggtcaaggttgcagtgagctatgatcacaccactgtaacaccactgtactctagcctgggagacacagcgagactctgcctccaaaagaaaagggggcgggggggtggggtgggtgcggagaatgggagggataatcctagcacttatctcacaggttgttgtgaagattaagagttctcgtttgtaaagcgcatagtccttgtagtgagggcttagtgcatgttaaccagttgttatttattccactgttcatttgttcaaaacaaagatgtgatgggccagtgatcttcattgccctcacaaagggatcccctcaaggtctcgtccatgcccacatccactcaggcagctctggagcagcgtcagccaggccctgctgtggaataaggatatttctctgcagaagtgagggtggcagtggagacagtgaggacagcttgtgcaaaggccctgaggccctgagttccccatccacagggtatggcccagagtgagggctcttctgggagagggggcaaaggaaggatatcccagggtgatctgagctgggccagctggagtgcagtgacgtcatcttggctcactgcaacctctgcctcccaggctcaagcgattcttccaactcagcctccagagtagctgggattacaggtgcctgctaccacacctggctaatttttgtatttttagtaaagacagggtttcgtcgtgttgaccaggctggtctcgaactcctggcctcaagtgatcctcccgccttggtcttcccaaaatgctgggattacaggcctgagccaccatatccagtggggcttgtggcaccttgaccgtccctcctcctttcctccccctctaggttgccatcaagattatcgacaaaacccagctgaatcccagcagcctgcagaaggtgaggctggggagacgggggagagcaggagccaggcttccggcacagccgggtgacccacctgacccttcctgcgggggcccggctggggaaaggatcccccaagccacccaccctcactctcctctgtcttcctttctggccacgcccagctgttccgagaagtccgcatcatgaagggcctaaaccaccccaacatcggtgaggagggaatgggagcaggggcaggccaccaactggaacacttgcaaaggagttgggggtggtggcagtggttagaatagttggagacccaccaggcgcagtggctcactcctgtaatcccagcacttagggaggccgaggcgggtggatcacttgaggtcaggagttcgacaccagtctgaccaacatggtgaaactctgtctctactgaaaatacaaaaattagcagggcatggtggcgggcgcctgtaatcccagctactcgggaggctgaggcaggagaattgcttgagcccaggagccagaggttgcagtgagctgagatcgcaccactgcaccccagcctgggcaataaagcgagacttcatctcaaaaaaaaaaaaaaaagaaaaagttagagacctggtttctcatagttgcatcactgctgtgtgaccttgggcaagtcacttaacctctttgagcctctattttctcttctggagtaggggtgataagagggcctattaccaggtcattgtgaggattgacaaagatgatgcatccaaaatgcttagtttgggctgagctatgggacttggtccagttatttccaccagcatcaacatcctcactgtcattatcattgggcagaggcgggagtgaggggtctttagtgagagaagcggagtttagctccgcctggatgtggctgcagcatttgttcattcattcattcatttactcagtaattattgattgagtggccgctatgtgccagaccctggggacacaacagggaagacaacaagacacaaatctctggcctcatggagctgaca[139 bp omitted]gtatctattaaaaatacaaaattagccggatatggtggcgcatgcttgtaatcccagctactcgggaggctgaggcaggagaatcgcttgaacctgggagggtgagcagagatcgcgccattgcactccagcctgggcaacaagagcaaaactccatctcaaaaaaaaaaaacgaaagtggaaagggtggtagagggggctgaggagtttggaaaatcttgctgtcagtagggagccattgagtgttgagttggggtgggggtgttatggttggcacatttgcatagttactgaggacaggttaggaggggccctttctccctaatgccctacactgttcccaaccattatagtgaagctctttgaggtgattgagactgagaagacgctgtacctggtgatggagtacgcaagtgctggtgagccgcccaccctctccgccctgcccctgtgccacctccccctgccgctgcacctgaccctgaccccgctcggcctctgccctgcaggagaagtgtttgactacctcgtgtcgcatggccgcatgaaggagaaggaagctcgagccaagttccgacaggttggggcagggctgagggtggggctgactgggtgcctgggtccctgggagggcgtctgagagctgggcatggtctgggctgtccagcgacctgggggcggggcttaagtctgggcaggggtgaaggtgcagagctgggtgtgctgggcatatagttgcccagatgtgagggcatccggatgtaggtttgcaggtgccccgttgggtgggtgagaggatgtttgggcatgaaggcgccccggtgggcaggtgttgcatgtgtagggcatgtgggtgtgcccagcgcgtaggtgtgtgggtgatgggggcacgaaggtgccagggtgccaggtgtgagtgtgccggagtgtgattcaaaagatgtgtgggcagtagctatgtgggtgcccaggtatgtaggtatgtaggtgtgtggggaagagagtgtagggcaccccaggtagatgggcaagagagggctgaggggtggttgtgtaagcttgtaggtactagggcatgccggtatgtgggtgcccgggtgtgcgagtgcccagatgtatgggtttccaggtgtgtggtagtgaggacacccaggtgtgtaagagtgtggggggggccaggtgtggagtaagaggacgtgcaggtgtgagggtgcccaggtatgtgggataagaagaagtgcaggtataagggtgcccaggtgtggggtaagaatatgtgcaggtgtgagggtgcccaggtgtggggtaagaggagatgcaggtatgaaggtgcccaggtgtggggtaagaggagttgtgggtgtgagggtgctggggcatgaggggtaagaagatgtgcgtgtgtgagggtgccaggtgtgtggggtaagaggagatgcaggtgtgagggtgccggggcatgtggggtaagcagatgtgcaggtgtgagggtgccgggcatgtcggctaggaagatgtgcaggtgtgagggtgtttctgccttgacgctgctgtcctgaactcaagggccataagccctggtgagttggggcggcctgtctatctacaggtatgggatatccccatgggagtttccagatgtgaaggtcaagagaggctggtccccatgccttggttccgacatccctgggcatgggggtgtcctgggggagacgtgtgtctgcccaggttccacgggcacctcttgctgtgactgaatcagggtgtgaggccccagatctcaggctgtgccttggggaggcctggggcccagctgtgagtggtttcacagtccactgagggaggctgagggttttgggagccacaaataaccaaccttccccttccctcccagattgtttcggctgtgcactattgtcaccagaaaaatattgtacacagggacctgaaggtaagcccccgacccgctgtgatctcagggaccacggctcagcccacagacttctccctgcccccacccctccatggtttccgtggcctccagcaaattcctccagcccttttctcctcctgctcttccctccacacccagcacccccttgaccctttcccaagcttttgtggcagaaacaaggccagcagatgggggagcggatgggggggaggggacaggaggagtgaacaaagcagggagaaacaaagtgtcccaaaatggccctggatgctacagggctgttggataaggacgctgggacatgataaggggtttgtcgctctcagagcctttgggaccttggcattctccgaccttaggacattcaggactccttgaggatttaggttgcagagc[133 bp omitted]gctccgcctcctgggttcacaccattctcctgcctcagcctcccaagtagctgggactacaggcgcccgccaccaagcccggctaattttttatatttttagtagagacggggtttcaccgtgttagccaggatggtctcgatctcctgaccttgtgatccgcccgcctcagcctcccaaagtgctgggattacaggcatgagccacggcacctggccgggaatctgagaacttaagaaggcttcgtttttatttttatttttgacatggagtttcacactgttgcccaggctggagtgtagtggccccatctcagctcgctgcaacctccgcctcccgggttcaggcgattctcctgcctcagcctcccgagtagctgaggtcacaggcacctgtcaccatgcccagctatttttgtatttttagtagagacggagtttcaccatgttggccaggcttggtcttgaactcatgacctcaggtgatccacctgcctcggtctcctagagtgctgggattacagatgtgagccaccgtgtccagtctgagaaggggctttgagagaaaagccaccttggccagtaccaggcaggaagggactcaacggggctccagcccagctacctgtaggagctgagccaggcagcctcctcgagtacctgtggccccagggtccgcattccacaccttccgctgtatgtctcagtcctcgcgctccaagaccaggtggctgaccgtttggttggctcaaatccggttgtcttgactgtcgttttgtgagcacctgtgtgctaggcggcatcctaagtgctttaaggaagtgcttctggaactatctgtgaggaaggactgggttggttttgttgttttgttttgtttttttgttgcccatactgaagtgtgatgtttccatcacagctcactgtagcctcaacctcttgggctcaaatagttctctcacctcagcctcctgggtagctggaaccacaggtgtgagccacaaagcctggctaatttttgagttttttgtagacaagggatctcactctgttgtccaggctggtctcgaactcctgggctcaagagattctcctgcctc[135 bp omitted]ggcctcccaaagtgctgggattacaggtgtgagccactgtgcccagccacaaaccccattttaaaagctattattagattctaaagaaattccacagtcaaattcctatggaggaccaggcgcagtctcacacctataatcccagcactttgggaggctgtggtgggaggattgcttgagcccagaagttcgagaacagcctgggcaacacacccaagacctgatctctacaaaaaataattgtaaaaaattagcttggctggacgcggtggctctcacctgtcccagcactttgggaggcctaggcaggcagatcactggaggccaggagttcaagaccaacctgggcaacacggtgaaactccatctctactaaaaatacaaaaattaggtggtcgttgtggcgcgtgcctataattccagctgcttgagaggctgagacatgagaattgcttgaacctgggaggtggaggttgcagtgtgccaagatcgcgccagtgcactccagcctggacaacagagcaagactccatctcaaaaaaaaaaaaaagaaaaaaaattagcttgtatgcctgtggtctcagctactcaggaggctgaggcaggaggatcccttgagcccaggaggttgaggctgcagtgagccatgatcatgccactgcattccaacctgggtaacagagcaaaaccctgtctctaaaaacaacaacaaaaaatacaaaagcagaaagtgcatctgaaaaaaagaaaaataatacaaaatgaaaacaaaaaacaaattgctatagaggttcaagtgctaaccctctcttcacttccttccactgggctagggtgtccctccacacggccctggaggcagcaccttagaggcttccatgattcacctggaggtcgtatgtcccctggtggagggtccccaaagcagctaacacgagttttggggtcgtattagtacaccaggggtaccaaccaaggggaccaacccatgtgactttggggctggattgcggagcctcaaatggcaggaaaagaaatgtaatccctggcctggcgtgacggctcacacctgtaatctcagcactttttgggaggccgaggtgggcggatcacctgaggtcaggagttcgagaccagcctggccaacatggcaagacctcgtctctactaaaaataaaaaaaatagccaggtgtggttgtgggcgcctgtagtcccaggtactcgggaggctgaggctggagaatcgcttgaacccaggaggaagaggttacagtgagccgagatcgtgccactgcactccaacctgggtgacagagtgagactccatctcaaaaataaaaaataagaaaaagtaagccccgagcaagccagatgctattacattcaggtttagggaggagctctgtggtgtgtctttgtagggtttgggcctttattggggcaggagctggggaagagtggtccagaaataaaccaggagacatagggagacctgggaggaagccagggatgctggtgacctgggcgagggaaggaccgcagttgggatgggccagacgcgggtgacattttgaaaggtggaggtgtgcctctgtttgtagtcagaaggctggaggcttcttcctccgcgcactgtggaaacgggtggccttgtttagattctagttgtgctgctttcttgcaatgggcatgagttgtggcctcccacagcttctgtttcctcccctgtgaaatggcaattgcaagaccgcatgccgcaaaaaaatagacaaaactttataacaatacaaaacgtttatttatttatttattcacttatttttgagatggagtctcgctgtgttgcccaggctggagtacagtgatgcagtttcagctcacgcgattccttgcctcagcctcccaagttgctgggattacaggcacccgccaccacgcctggctaatttttgtattttcagtagagacagggttttaccatgttgcccaagctagtctcgaactcctgacctcaggagatctgcctgccttggcctcccaaagtgctgagattacaggcgtgagctaccgcgcccggccatgaaatgtttactgatcactgactgtgctctaggggccgctgtgagcactttacgcttaaacccacaaccacgcttgaggcaggtgtcgagatcaccctcagtttacatacaaggaaactgaggcacagagaggtctggtaacccacctaaagttcacacagcgagtgagtggtggagctgggatttgcagctggaattctccgagagtctgtcgtttcaccttcacgttatgcagacagacactgttataattgatagtccacagagcccagtgcatggtagatatgcaaccaggattaaattattgctttcgttttcctgggtcttgagcaatcaggccttattttgtttctgctgggtaacttgaggctccaagaggggcaggagattacctgaagacccctagatctgcagaccacatggggtaatagtgatattacatagtactcgctgggtatgaaatactgttctagcttttctttttttttgagacaagttctcactctgttgctcaggctggagtgcagtggcacagtctcagctcagtgcaacctctgcctcccaggttcaagcaatttttgtgcctcagcctcctgagtacctgggactactggcgcacaccaccatgcccggctaatttttatctttatgtttttttgagacggagtttcgctcttgttgcccaggctggagtgcaatggcatgatctcggctcaccgcaacctccacctcctgggttcaagcaattctcctgcctcagcctcccgagtagctgggattataggcatgtgccaccacgcccagctaattttgtatttttagtagagacggggtttctccatgttggtcaggctggtcttgaactcccaacctcaggtgatctgcccacctcggcttcccaaagttctgcgattacaggcgtgagccacggtgcccagcccaatttttgtatttttagtagagatggggattcaccatgttggccaggccgatcttgaactcctgacctcaggtgatccacctgccttggcctcccaaagtgctggtattataggcgtgagccactatgtctggcctgtgctaggttttctatgtggattaactcataattctcaaactacgctatgaaataggaactaagattatccccattctatggatgaggaaactgaggctcagtgaggtaaagttactacctaaggtcaggtagagagtaaaggacaggcccaagagttgatccctgtgggccagccctagagcctgtgctcctgtctgcctcccacgtccatgaaaggctttggccttgagtcccactttccgccctctccttctctccctgcaggctgagaacctcttgctggatgccgaggccaacatcaagattgctgactttggcttcagcaacgagttcacgctgggatcgaagctggacacgttctgcgggagccccccatatgccgccccggagctgtttcagggcaagaagtacgacgggccggaggtggacatctggagcctgggagtcatcctgtacaccctcgtcagcggctccctgcccttcgacgggcacaacctcaaggtaccgagaggggctgggtgcaggggcatcagcccctccccacagtcaggcccctatcccccccacacctcccctgcagagggcctcagtggtgggactggcctgagttctcatgggaagatgggggatgggcaggattcaagtcccctctgcagtgaggccagccgaatggactgtgccatgctggggttaagggcatgatctttgcagctgataggcttgagttcaaatcctgactcatccgttcactgagctaatatttatggcccacttctctgtgtcaggctctgttttgggctttgcatgtaaggcgagaacaagagaggcaaaaactcctgcttggccgggtgcggtggctcatgcctataatcccagcactttgggaggcggaggcgggaggctcacttgagcctgggagttcaagaccagcctgggcaacatagggagacgctgtctctacaaaaaatacaaaaattaaccgggcataatggcgcacgcctgtagtcccagctacttgggaggctgacgcgggaggatcacttgaacctgggagatcaagactgcagtgagctgagatcgtgccactgcactccaacctgggtgacagagggagaccctgtctccaaaaagaaattaaaaaacaaaccctgccctcgtatatgctacgctgtgggtgaaccttgaaaacattgtgctaagtgacagaagccagtcacataaggccacagaatgtatgattccattaatgtgaaatgtccagaataggcaaatccatagagacagaaagtggattactggttgcctgaggctgggggggaggagcaagttggaggttgattgctaaagggtactgaatttcttttgaggtgatgaaaaatgttctaaaattcaatgtagtggccggcctgatggctcacacctatattcccagcactttgggaggccgaggcaggcagatcacctgaggtcaggagttcgagaccagcctggccaacatggtgaaaccctgtctttactaaaaatacaaaaattaaccgggtgtggtggcaggcacctgtaatcccagctactggagaggctgaggca[149 bp omitted]ctaaaagccatcgaattgtgcacttcgcttcaaacaaaacagttcctgtcttcccagactaacattcctactggggccaggcagctaacaaaacaataagcaaactagatatgatatcagatgctggcctgtgctatgctggggggaatactgtaaggggatgggaggtgtgggctgagttgttgcttgctttttttttttccccctttgaactttttattttgaacgattgccaatctacggaaaagttgcaacagtagagcaaataacacatggtatgtttcaggagcttcacaatcgctggcctgtgtccacatttgctctatctgtctgtatttgcacatgatctttgctgccctcatcggcattgatggcgcatttgacagttagttgcagacgctgtgtccttttatccctaaaggcgagagcgggttatctcctgagaccaggggcgttttcctgttgacggtgacatacaggaaatacagcagtggtataatcctggcctctacgccatggcccatactcagatttcatccatcatcccaggaatatctttggcagctatttttttttcccagtcggggatccactcgggtccctgcgttgcatttagctgcgccatctcttgtgtctcctttcatccggaacagttctcagcctctcttttgtctttcatgacattgacattatcgattagttcaggccagttaattttgcagaacgtccctcaatttgggttgcctggtgtttcctctcgattggaatcgggggtgcattggggcaggaattctgcagctgggacgctctgtcctgctctgcgttgcccgtgaggagcacgtactgtgatatgaaattgtaaagtcagggaaatacttgcagaggacagaccatcaaagcggaaccctgagtgatgaagaggagggagtcccttcttcacagtggccttggccaaatagccaacccctctaagcctcagtctca[146 bp omitted]cccgtctcttctaaaaatacaaaaaattagccgggcgtggtggcaggcgcctgtagtcccagccactcgggtggctgaggcaggagaatggcatgaacctgggaggtggagcttggagtgagcggagatctcgccactgtactccagcctgggcaacagagcgagactccatctcaaaacaaacaaacaaaaaagatgataccaaccttgtggcagtgatttttaaggactggctgagatcagggatgcaaagtgctcattcaagacagccttctggccgggcacggtggctcaggcctgtaatctcagcactttgggaggctgaggtgggcagttcacctgaggtcaggagttcaagaccagcctggccaacatggtaaaaccccgtctctaccaaaaacacaaaaattagctgtgcctggtggcatgcgcctgtaatccctgctactcgggaggctgagacaggagaattgcttgaaccagggaggcagaggttgtagtgagccgagatcacaccactgcactccagcctggatgacagagcaagactctgtctcaaaaaaacaaaacaaaacaaacaaacaaaacaggctctgacactccggccatagctgaagtctggggtggggaggtgttgtcacagaataatttttctgagcctcaagcatgaagctaagagacctttttgaagggccaggccagtgtcttacctgccccaggtccttgtcactttctgccatcctggtgtccccaccaggcaccccaggccttgctgtgcaaaggaggcacacagctgagaagaggcaggttctagctctgtcatttcctttctgagtgaccttggacatgtccttttctgaacctcagtttccccacctgtaagatgaagacactaagagtattcaggacaggtgtcgtggctcatgcctgtaatcccagcaccttgggtggccg[134 bp omitted]gatccaggagaatcacttgaacctgggaggcagaggctccagtgagccgagattgcgcccctgcactccagcctggacgacagagcaagactccatctcaaaaaaataaaaagagtttgacaccagcctgggcaacatttcaagaccacatctctacaaaaaatattttttaaattagcctggcattgtggtgcatgcctgtagtcccagctacttgggatgctgaggtgggagaattgcttgagcccaggagttccaggctacagcgaactatgatcacgccactgcactccagcttcggtgacagaacaagagcctgtctctttaaaaaaaaaaaaagcatctgcttgcagcccgtctgcatatgttaagcccttcactggagcttggcatctggccacagcatcatgcttgggagctgcgctggaggtggcagtggtggcctgatggtttcttctcccccatcacgtgataggcagtgtggcatggtggtcacacagcacaggctccagagccaaggctctgccactttctggctgtgcaatcctggggcaagtgaccaaacccctccaggcctcaacctcctcgtctggaaagtgggcgttataaccgggcttcgcggcgttgtgaaaatggatgtaatatgcataaagcacttagaacactgcctgctaaggggtaagtgtcctgaaagtgatccaaattaaatattaatagccctttatgatctgcagaggctccccaggcatgggcatctttcagcccttttaggagaatgctgcagcagaggactctgtcctaaaggagtcctgttcacccccaacgctcaattcattcctacctgttttctgcctcccttcgttttttttgttgtctgtttgttttttgagacaaggtctcagtcacccaggctggagggcagtggtgcagtcacagctcactgcagcctcaacctcccgggctcaagcaatcctcctgcttcagcctcctgagtagctgggaccacaggcatgtgccaccacacctggctaatttttgtattttttgtagagacagagtctcgctgtgttgcccaggctggtctcaaactcacgggctcaagcggtcttcccaccttggcctcccgaagtgctgggattatagacataagccaccacgcctggcctattgcggttttttattcagatggaaagagctccccctggtctgccaagctatggatttatcttatttttcacagctttggtagggcctctcataaaaggcccttaaagagaaagccagcagataaatccatgaatggccttgaggagtgtgtctctttggacagcaggcatggctgggggaggggagagacgagaaggcaggagaggcagtagggtctccttccccttgagtgaatctcatatttacataccgctctctggctctgggccaggcatgtggtaagcattttacagatttttttttttttttttttttgagatggagtcttgctctgccgcccaggctggagtgcagtggcgcagtctcggctcactgcaacctccgcctcctgggttcaagtgattctcctgcctcagcctcccgcgtagctgggattacaggggtctgctaccacacccagctaatttttgtattttttttttttttagtagagatggggtttcgccatgttggcctggctggtttcgatctcctgacctcaggcgatctgcctgcctcaccctcccaaagtgctggaattacaggcgtgagccaccgcgcccagccacatttttacggatattaactcacctgtaccctggtagcaagcatgtgaagtgggtcctgtaatccctttcacggataaggagaccgaggccccagtggctgactcacttacctacctccctcttacctgacttagagaataaacttccttttttttctgagacagaatctcgccctgtcacccaggctggagtgcagtggcgtgatctcaactcactgcaacctccacctcctaagagtttaagtgattctcgtgcctcagcctcccaagtagctaggactacaggcagccaccaccacacccagctaatttttgtatttttagtggagatggggtttcaccatgttagccaggctggtctcgaactcctgacctcaggcgatctgcctgtctcggcctcccaaagtgctgggattacaggtgtgagccaccgtgcctggccagataataaactttctctgcaagttttcctctgaatgaaaagttatgtagcttaaatttttttttttttttttttgtagagacaggctggttgttcaggctggtcttgaactcctgggttcaagctatcctcctccctcggcctcccaacgtgtttggattacaggtgtgcaccaccatgctcaggtcattttttattttttgtagagatgaggtctccctgtgttgcccaggctgttcttgaactcctgggctcaagcgatcctccggtcttggcctctacgcctggccaagaatttttttttttaaattgcagcgtccatatgatgttcccattttatggacagggaactgaggtcaggagaaaggaatggggttttgcttacctcgtcaaggactgggactcagagcttctgtcacttctatcaaaggggttgggacaaaggttgtgtgtgtgtgtgtgtgtgtgtgtgtgtgtgtgtgtgtgtgtgtgtaataggtggggggcggggcagaccccctcctccagtaaccccatccctgcaggagctgcgggagcgagtactcagagggaagtaccgggtccctttctacatgtcaacagactgtgagagcatcctgcggagatttttggtgctgaacccagctaaacgctgtactctcgaggtgagcccagcctcacagccagcgggagcccttctagtctcctgactcccctaaactctgcctgcccccacccacaaaagccttcttgacacacttttcctctcctgtgcccaccgaagatctgctgctggtgagtgggggtagacaggccgtccagggaaaagctcccaggcctgtcctgacgccacccccccgacaggctcacccactccctgccttgccagtaattagctaatgagctcctaggatgattacagggtgccagggacccagatgatgcggaggagggagggtggcatcaggaggctccggcaggggacgtgggggagagagaggcccaggaggcgctatctcttaggaagcccgcaattctgggtgttaggcctcggaggtttggggcagggcagaagctgtatgatttctggttccttctgacacctgtcttcccccttccctgctcctgatgcctgcagcaaatcatgaaagacaaatggatcaacatcggctatgagggtgaggagttgaagccatacacagagcccgaggaggacttcggggacaccaagagaattggtgagggtcagggagagccatcctgtcacccaggatggagtgcagtggtgcaatctcggctcactgcaacctccgcctcccagaatcaagagattcttgtgcctcagcctcccaagtagctgggaccacaggcgcctgccgccatgcccggctaatttttgttatttttagtagagacagggttttgccatgttggccatgctggtctcaaactcctgacctcaggtgatctgcctgcctcagcttcccaaattgccaggatcacaggtgtgagccactgtacccggcccatgttcgctttgatattaagacataaagagagaccaggcgaggtggttcatgctggtaatcccagcactttgggaggtcgaggtagaagaatcacttgagcccaggagttggagaccagcctggccaacatagggagaccctgtctgtacaaaaaaataaaaataaaaaattagccagttgtggttgtgtgcacctgtagtctcagctactcagcaagctgaggtaggaggatcccttgagcccaacaatttgaggctacagtgagctatgatcatgccactgcactccaggcgacagggtgagaccgtgtctcaaaaaaagaaaaaaaggtcaggcacagtggctcacgcctataatctgagcactttgggaggctgaggctgacagatcacctgaggtcaggagttcgagaccagcctggccaacatgatgaaacctcgtctctactaagaatacaaaaattagatgagtgtggtggcaggcacccgtaatcccagctcctctggaggctgaggcacgagaattgcttgaatccaggaggcagaggttgcagtgagctgagattgcaccactgtactccaccctgggcgacaagcaaaattccatctaaaataacaataattacggtttttaccattaaatggcaaaaaccggaattacttttgtatcaacctaattatattagtaggttgaacacaacaaaaagttgaaccatatgaaattgccatttttttggtttaaaattgtcagtaccaccaattttgtatggtttaacctaatagtgatgatttattctgccacataactaaaatgaatagagtatgcagccttcaggcacagttgtatccaggtgctcagagacagttgttgggaatgttttctgtggtagctttttcccaggctgctctccaggaggcaagcagatctgggtcacatgccttcaatgaagcagtcagtgtggctttgggtgtagaacacactaattagccagacctgggttatccgcctgccttagggttggagcaggggagccatccacgtgatctgagcggaaagaatgttctttcaaaggaaatcaatgtgctgttgggaagggaggatgggtactggacaggtcaaagagcagacaccagtgaatgacacagaaatgagtggaagtgggccaggtgcagtggcttatgcctgtaatcccagcactttgggaggcccaggtgggtggattgcttgtgcccaggagtttcaaaccagcctggacaacatagcaaaaccctgtctctactgaaaatacaaaaactgaggtgggaggatcagcagagcctggggaggccgaggctgcagtgagctgtgaccgtgccactgcactccagcctgggtgacagagtgacaccctgtctcaaaaaaaaagagaaatggatggaagttaaagtttctgggagtctgaaacttctctccatccccccctcccagaggtgatggtgggtatgggctacacacgggaagaaatcaaagagtccttgaccagccagaagtacaacgaagtgaccgccacctacctcctgctgggcaggaagactgaggtcagggggcgccaggggcccttggggacgcgtgatgcctgggtggagggacttggggtgcagaagagcctcatctgtcatcctctcgcaggagggtggggaccggggcgccccagggctggccctggcacgggtgcgggcgcccagcgacaccaccaacggaacaagttccagcaaaggcaccagccacagcaaagggcagcggagttcctcttccacctaccaccgccagcgcaggcatagcgatttctgtgagtatcaaccccacgccctcacgcaccctccttctccccaaggcccagacttacagttacgtcagggttctctgattggcaagcaacagaaacccactggagctaacctcagagagggaggaatgtcttataaagacacagggcattgcatggaacttggaggcaggaatgcacagccaggctcaggaagggattaaaaccggaaaagcagccagacccagagcagacactctctgtcttgcttcctctctgcttgtgtggtttttcctttgtctctcacttatctcatcctatcttttttcctgatgtcccagctccccgatttttttttttgagatggagtctcactctgtgcctcaggctgtagtgcagtggtgtgatcttggctgatggcaacctctgctgcacaggttcaagcgattcttctgccttaggctcccgagtagctgggattacaggcgcctgccataaccccccggctaatttttgtattttcagtagagatggggtttcaccatgttggccaagctggtcttgaactcctgacctcgtgatccaccctcggcctcccaaagtgctggcattacaggtgtgagccactgtgcccagccttttcttttcttttctttctttttttttttgagacagagtctcactctgtatcccaggctggagtgcagtgtcgtgatcttggctcactgcaacctccacctcttgggttcaagcgattcttgtgcctcagcctcctgagtagccgggattacaggcacctgccaccacacctggctaatttttgtatttttagtagagacagggtttcaccatgttggccaggctgctcttatactcctgacctcatgatccacccacctcagcctcccaaggtactgggattacaggtgtgagccactgcacccagcccccaatttcttaccttagagaccagtccaaatggcagctggaatctctggtccaggatgaagctctgatatcagagtcaagtttgaattaatccattgtaactggggcacaggaggacacgttgtacaaagtggctgctgagagtctgccctctggctttgcctccacactgaagtaaaggaggctctggaagagagctgggcggacagctgattataccccacattctgcaactgacagacatctcatctgctgcagaaaatgaatacagagtctgagtttaaatctgggccaggcacggtggctcatgtctgtaatcccttgggaggccgaggtgagtggatcacctgaggttgggagtttgagaccggcctggccaacatggtgaaaccctgtctctactaaaaacacaaaattagctgggcgtgttggtgcgtgcctataatcccagctactcgggaggctgaagcaggagaattgcttgaaactgggaggcggaggttgcagtgagccgagatcatgccattgcacaccagcctgggcaacagagagacctcatctcaaaaaaattaaaaaaaaaaaaaaaaggatacacaccaccatcagcacccattaggcatggagacttctgagaggtcccttcacccacacactcatcaaattttaaccctctcttctattttttttaacggctttattaaggttaaaatt[137 bp omitted]acatagcaagaccccgtctctacaaaaaaattaaaaattggccaggcacagcggctcacgcctgtaatcccagcactttaggaagccgaggtgggaggatcacgaggtcaggagttcaagaccagcctggccaagatggtgaaaccctgtctctactaaaaatacaaaaaaagccaggcatggtggcgggcacctgtaatcccagctactcgggaggctgaggcagagaattgcttgaacctgggaggtggaggttgcagtgagccgagatcacgccactgcactccagcctgggccacagagcgagactccgccaccccgccccctaaaaaattaaaaattaggtgtggtagtacacgcctgtggtcccagctacttgggaggctgaggtaggaagaccacttgaacccaggagatcgaggtcgtggtgagccgtgatcgcgccactgtactccagcctgggttacagagcgagacctcatctcaaaaaataaattaaaaagtgcacaattcagtggctttaatatatttatagagttgtacatctatcatgatgaccgatttcagaacattttcattaccccaaaaagaaaattcacaacttttagcaatcaacttccaggcagggcatggtggctcatgcccgtaatcctagcactttgggagactgaggcaggcagatcacctgagcgcaggagttcgagaccactgggcaacatggcgaaaccccatctccactataaaatacaaaaattagccgggcgtagtggcaggcgtctgtaatcccagctactcaggagtctgaggcaggagaattgcttgaacctgggaggcggaggttgcagtaagctgagatcgcgccactacactctagcctgggcgataagagtgagacttcctctcaaaaaaaaaaaaaaaaaaaaaaaaaaatcaacttccaatcccccttccaccctcagctactaatctactttctatgtcgatgaatttggctattctagacatttcaggtaaatggaattacacgatgtgtggccttcagtgactggcttctttcatttagcagaaagttttcaaggttcatccatgatatgggtatcagcacttcattccttttcattggcaagtaatattccattgcatagatagaccacattttgtttatccattcatgaacacgtggattgcctccactttttggctgttgtgaatgatgctgctgtgaacatttgtatccgtgtttttgtgtggctgtgttttgccgtcatttctcttgggtacgtatctgggagtggaattgctgagtcatctggtaactgtgtgtttaataatagtttgaggaactttcagggtgttttccaactctgttcgttttacagccctgcttgtctgcaggggtgaagttcttactctgggacaggtactaggctgtctgcttgtctaatcttttttttctctgtcttacatatctcaccttatctttttctagatctctcagctcctagatttcttcttttttttctttttttgagacagagtctcactctgtcgcccaggctggagtacagtggtgcgatggtggctcactgaaacctcagtctcccaggttcaactgattctcctgcctcaggcccccgagctggaattacaagccaccttgcccagctaattttgtatttttagtaga[138 bp omitted]ttttttttggaggcaaagtctcgctccgttgcccaagctggagtgcagtggcgcaatcttggctcactgcaagctccacctcccgggttcatgccattctcctgcctcagcctcccgagtagctgggactataggtgtccaccaccacgcccagctaattttttgtatttttagtagagatggggtttcactgtgttagccaggatggtcttgatcgcctgacctcatgatccacctgctttggctttggcttcccaaagtgctgggattacaggcatgagccaccgcgcctggcccgctcctagatttcttacatctcagttttagaatccagcccagggctgagtgcagtggcttacgcctgtaatcccagcactttgggaggctgaattgggtggatcacttgagctctcaagttcgacaccagcctgggcaacatgatgaaacctcatctctacagaaaaatacaaaaattaggctgggcgcagtggctcttgccttgtaatcccagcactttgggaggccgagctgggtggatcacctgaggtcagcagtttgagagcagcctggccaacatggtgaaaccctgtctctactaaaaatatcaaaattagccgggtgtggtggtgagcacctgtaatctcagctacttgggaggctgaggcaggagaattgctggaacccgggaggcagaggttgcagtgagccgagattgtgccattgcacttcagcctgggcggcaacagcaagactctgtctcaaaaacaaaacaaaacaattagctgggcatggtggtgtgcacctgtaatcccagctacttgagaggctgaggtgggaggatggtttgagcctgggaggccgaggttgcaatgagtccagatcgtgccactgcactccagcctgggcgatagagccagactgccgtgtctcaaaaaaaaaaaaaaaaaaaaaaaagaatccagcccaagtgttagctagaatctccttggtccactcatcaggatcaggatggagctctgatatcgagtccagttgggattaatctgctgtaatgggggcacaggaggacacattgcacaaagtggctgctgaaagcctgcgctctgacctcccctccacactgaagtgagggaggagagaggtgtcagggaatctgagacccagcatgagccccacacgggaagtggtgcttctgccctacccccaccattgctggaggtcaaaccattccctgcccctgcgtcttgtctttcccacctgtaaaatgacagggcgtgcccagaaagttcctaaggagcttgtgactttggtatcatatggttagaacgtggtaaccttcagaactccccacactgagacctgagttccagggattctcagagagggattgctggcaggtgccaggtatctgtcattgtcattgtagagctctcagcttgtggttctgggacttctgagcatgtatcgctcctgaggatgtaacaagcagaccttctgaccctctcaagtttgagatcacttttcacccccgggttctaaaacagtagattcctaagatgttcctagagaccagaattattttgtgttgcttttgaaattgttcatacaataacatccttgaaaatgtgttagtttggaaaggatagacagtgaaaaagtcttcatccaacacatatccccagctcccagtttctcaaatgcagcaactgttacggttttttgttgttgtttttgttttgttttttgacggagtctcgcactgttgccagactggagtgcaatggtgtgatctctgctcactgcaacctctgcctcccaggttcaagcgattctcctgcctcagccttccaagtagctgggattacaggtgcatgccaccatgcccagctaatttttgtatttttagtagagacagggttttgcca[269 bp omitted]atggcgaaatcctgtctctacaaaaaaaaatacaaaaattaggtgggcatggtagtgtgtgcctgtagtcccagctacttgggaggctgaagtgggaggatggcttgagcctaggaggccaaggttgcagcaagctgaggtcacaccactgtacttcagcttgggcaacagagtgagatcctgtctcaataaaaaaattaaaaaaaagaaggaaacttaagatatataaaaacaataaattctccccttttgaaacaagttatagtcctttggagatattcatatataagcaagtagatatagatacacacttttttgcttttgtagacaaatgataacacattgttgacccatctcttgtcttgccttttctactttccagtccgtcatgaagatcattctgtactggtgcataaagtgcttccttattcttttttatagctgcataattttccactgtggaaataccttgacttatctagtcattcctctactaaggggcatttaggctgttcccagtctaatggtacaggccaggtggggtggcacacacctgtaattccagctacttgggaggctgaggcaggagaattgcttgaacccaggaggtggaggttgcagtgagcggagatcgcaccactgcactccagcctggcaacagaaccagactttgtctcaaaaaaaaaaaaaaaaaaaagaaggtgcaatgaatggcctgtatgtgcatgatgtcattgatttggagtttctaagtcagtatatgtgcgttggtaatcttgaggtaattttgacagatattgtcagaatggcccacacagagattgcaacccacgtgaggaattctcaggttccaacgatcccccagagtcagttctgggtttccgtggtgatgccagctctaaacggtaccccctcccccaggtggcccatcccctgcacccctgcaccccaaacgcagcccgacgagcacgggggaggcggagctgaaggaggagcggctgccaggccggaaggcgagctgcagcaccgcggggagtgggagtcgagggctgcccccctccagccccatggtcagcagcgcccacaaccccaacaaggcagagatcccagagcggcggaaggacagcacgagcacccccgtgagtgaccagggctggggggcagggctgggggcgccacctgggccacattcctcaggccctgccttcatctcattccccagacggaactccttcttaccaactccttcttctacccattcattcattcaacaaacatttatcgagtgcctctgtttgcctgagctcagtttatacactaacatttgatgttagcgtataaattagtgttctgtgtcaaagaagtgcagaacgtactcttggcagaaaggatttaatacaggaaattaagtgcttttaaaaatgtgggaaaggccaggcacagtggctcatgcttgtaatcctggcattttgggaggccgaggcgggaggatcacttgaggccaggagttcaagaagcatagcagacgccatctcaactaaaaatcaaaaaaattagccaggcatcatgttatgtacctgtggtcccagctactcgaaagaccgaggtgggagaatcacttgagcccaggaggttgaggctacagggagctgtgttcccgccactgcactccattctgggtgacagagcaaaaccctgtctcaataaatcaataaataaaatattaatagtaatttaaaaaatcaggccaggcacagtggcttacgcttgtaatcccagcactttgggaggcagaggtgggcggatcacttgaggtcaggaatttgagacctgcctggccaatatggtgaaaccccgtctctactaaaaatataaaaatcagctgggcgtggtggcgggcacctataatcccaactacttgggaggctgaggcaggagaatcgcttgaacccaggaggcggaagctacagtgagctaagattgcgctactgcactccaggataggtgacagagtgagactccatttcaaaaaaaaaaaaaaaaagccaggtgcaatggctcatgcctgtaatcccagcactttgggaggccaaggcgggcagatcatgaggtcaggagatcgagaccgtcgtggctaacacagtgaaacctcaattctactaaaaatacaaaaaattagctgggcatggtggcatgcacctgtagtcccagctactctggagggtgaggcaggagaatcgcttgaacccgggaggcagaagttgcagtgagccaagatcataccactgcactccagtctgggtgacagagcaagactctgtctcaaaaaaaaaaaaaaaaaagtcgtgggaagcagcagcagcttccccagctcctcagctcttccggcatctacattcggtcccactccctgctcttctgctctgcacatgttcagtagccgccccacgtggctgtgcccttggcctttcgaggctggtcacggcaggttactaccagtcaagtcccagccttgaccagggtgcacacaggtgtgagtctgagccaattgtgggcctaaacttttaaaagtatgggtcacctgccaggcgcggtggctcacgcctataatcccagcactttgggagtccgaggagggtggatcatgaggtcaagagatcgagaccacctggccaacatggtgaaaccccatctatactaaaaatacaaaaattagctggctgtggtggcgcatgcctgtagtcccagctactcaggaggctgaggcaggagaattgcttgaacccaggaggcagaggttgcagtgagccgagatcgtgccactgcactccagcctggtgacagagcaagactctgtttcaaaaaaaaaaaaaaaaaaaaaaagcatgggtcaccacccacacagacacaaaatacttatagttatcctttaccataagattttgctctttaacaaataagttggctgggcacggtggctcatgcctataatctcagcactttgggaggcccaaggtgggcggatcatgaggtcgggagttcgagaccagcctggccaccatggtgaaaccccatttctactaaaaatacaaaacttagccaggcgtggtggtgcacgcctgtaatcccagctactcaggaggctgaggc[131 bp omitted]aagtttttagtcagacatggtggctcacgcctgtaattccagcactttgcaaggctgaggtgggtggattgcttgagctcaggagttcgagaccaacctgtgcaaaatggtgagaccccttccctacaaaaaatagaaaaattagtccggtgtggtggtggcacgtgctggtagtcccagctacttgggaggctgagggaggaggatcacttgagtccaggaggcggaggttgcagtgagccaagatcgtgccactgcactccagcctgggagtctccagagggagaccttgtctcaaagaaacaaacaaaaaagtttttaaatactaatttttctcgtacgttcttgagaacattcatctttttaacttcttcttagtgctcttggtgcccctgggtacttccagtttattttggttctaaacacccaaggcaaaccaaggtctcactgcatggctgtttgcgaggtaggggtgtttctccagaggtcctgaccatcaggaggcacccagccgtggtggctggtggtgtctggctgttaccagcattcaccagccttgaccggctttgactgattgtgactggccttcactggcagtgcctgacagggccccactgaagctttgaccacaagtgtccacctgttaccagtggcagccagctgtggccagcattaaccagcctttactggcagtgtccagccatgaccagtattaaccagcagcaactgactgtgaccggctttgaccagccttgactggccgtgacaacccttggccaacggtatctggctgtgaccagtggtgtctggctattaccacttatgaccagctttaactgtccctgactgttggtgactggccatgaccagccttaactggctgtgacaggctttgaccagcagtgtctggccatgaccagcagtagccagcagcaactggcaatgaccggctgtgtttggtttggctagctgtgaccctgccaccacctgtgaggactgctagtccaggttcagggccctggactccagggctgtgcagagcccggggtcagtacagggaggggagtggaatgttgtgagggaaccccgtggggatgggccaggagagggtgcacctgaggacagctcactggctacctaacagcagaagggccttggggaaacagatcttgaaggcatcagctcaacttcaggcaggtggcacaggagggaggccgggatgcctgtgtgtcctgagtattccggataagtacaaattcatgccccttggctcttccccagccccgagacctggagcttcacaatgcagcctctgaggcccgtgtgtcagagaatgatccacaacccagagaatggatgggagcggcagggccaaagaaggagaggatgaggtggttaaagaaaaaagaaaacaaaattgtaggaaggactggaggagcggacaatgggtgggatttgtaggaacaacagtcacaaccacaccacagaactgacccaccaagggagctgctccttctgaggctgccccagcactggtgaattcaagagtgcattgttaggccaggcatggtggctcatgcctgtaagcccaacagtttgggaggccgaggcggtgaatcacttgaggtcaggagttcaagaccaacctggccaacatggcaaaatcccatctgtacaaaaaatacaaaaattagggccagg[138 bp omitted]gtggcgggcacctgtagtcccagctactcgggaggctgaggcaggagaatggcatgaacctaggaggcggaggttgcagtgagctgagattgccctactgcactccagcctgggtgacagggtgggactctgtctcaaaacaaaacaaaacaaaaaaccacattgtcatggctgtaacccaagactcaaaaacttcatcctccatcagaagagcttcttgatgcccagagggctggacaataggcactggggccctgctgaagcaaagaccttcatctcatagccttgcctgtgtgagctgaagtcaaagcaggcaggagagcagctgctgccccatttccaccttccaaatcttcatgaatgcaaagattggcagaacccaacttatatgcagaacctgagctgcaaaggattctgggaaatgtaggacttggcttttttgcatctgagttcccaagaacagcaaagtacgaaaatatcctcaacataggaacaggagagtggaggcagagctggacatggtggcacacacatgtagtcccagctacttgggaggctgaggtgggaggattgcttgaggccaggagttcgagaccagcctgggcaacatggtgagatcctatctcttaaaaaagagaaaaagggtggaggcagtttgagaaagtggccgggactctgaagccacgtagagtttgaattacattaatgagccgtgtgaccttgggcaagtaacttcacctctctgatctttgatatctcactatgtgaaatgggctcattaaagaacctgggtcattgtgaggatcttgtaagatctcatacgtgaagtacttcacatactggcacagtaagcactcagtgaatgagagctattgttattgctaaacgaaacccacaccttaagaaggtaaaaaaggaaaagcaaataaacctcaaagaaagtagaagggaccggaattggtggctcatgcctgtaatcccagcagttcgggaggctgaggcaggaggattgcttgagcccaggagttcaagaccagcctggacaacatagaccctgtctctgccaaaaataaaaattagctaagtgttgtggcacatgcctgaggttctagctacttgggaggctgaggtgaaaggatccacttgaggccaggaggtcgaggctgcagtgagccatgatcaccccactgcactccagcctaggcatcagaacaagaccccatctcaaaaaaagtagaagggaggaggcattaaagagaataaatcagtgaaggagaaagaagaggtacaataaagcaacaaaacctaaagttggttttttgaaaagattaataaaatcagtctgggcgtggtggctcatgcctgtaatcccagcactttgggaggctgaggcgggtggatcacttgaggtcaggagtttgagaccagcctggccagcatggtgaaaccccatctctaccaaaaatacaaaaaattagctggatgtggtggtccacacctgtaatcccagctactcgggagactaaggcaggttcacttgaatctgggaggtggaggttgcagtgagctgagatcatgccattgcactccagcctgggcaaaatgagtgaaactctgtccaaaaaaataaataaataaataaaatccaatggacccctggtaaaaatcaattaaggaaaaaagacagcaaacatgaatcaccagtatccacaatgaaaaggggaactttgttctaacattaaaagatagtaagatgatattaggaactactttgtgccaataaatttaacagcttagatgaaatggacacattactttaaaaacacactgtatcaaaactgacacaagaagaaatagaaaacctgaacagtcttatattcttgttaaagaaattgaattcgtaactgaaaaccttccctataaagaaaatttttggcttggatgactcccaccagtggaattcttccaaacacttaaagaagaaataacactaaccttagacaaacttccagagaatagaaaaagagggctctcttcctaacatgtttatgaggcagcataatcctgatattccctgtgttcccagagctcacagcccagtatgggatggggacatatatgagaacagacattgacagcacagtgattgaagctgcagtggggagcccaggggcctgtgggaacccaaaggaggaggcacgtgactcagcctggggccgggggtggtggtagattatgaactgacacctgaaagatatgtaggagtgagtcaggggaaaaggtaggagtaatgttctaacaggtgagacagccagtgcacaggctagtcacagtgacagaatgtggcatgaataagtacattagcaaacgtttggtgtggctgggctggacctcaagaaggtgggcattgctgggagaagagcggtggacaaggatgccccctggaaaccttccctgcctcgttttccctcagtgcccccctcttctccggtctccaggggtctcccctgactcagcctcggtggctgggattactcatgaacctttcacatctttgggacctttcaccatctcctactcaccctgggttcccacatgagcccctgacttattcatcgatggggagggcagagaagggaagagggagaagctcaggggcatgtcttcaccccctcactcccttcctggctgtgtctcctgcagaacaacctccctcctagcatgatgacccgcagaaacacctacgtttgcacagaacgcccgggggctgagcgcccgtcactgttgccaaatgggaaagaaaacaggtacggagggggcagcaacagggtgaggggtgggaagtagggggtaggtgaacaggacctcccttgatctgagatgataggcattggaggctggtgccatggggaccagagagtgagtgtatctgccctgcccttggcagaatcgacccatgtacccccctgaaaatcctccccacttaattaattagtcttaagcaccaggaaagcagttggccctgttctccgcctacaagccttgggaacctgaattgattttttgaatgatccatttttagaactcgagagaagccccagaatgtcacagcttcagcgtcatctggttggctggttttccggcttgttggcctgagtctgtgaggtctcttccagctggcaagggagggaaaccagttcagactggctggagcagagagagggaagggattggttcacatcacaggtcaaggccagctagaatggggccagctccaggatgaggacactgccccccaccagggctgtagggcaggttgatggccaacaccagggcacactctgggatgcacctgattagtgggtgcaggtgttcccactgggtgtgggcagaggaatggggtagttaacagtcacaaatctgtccaggcacagtggctcatgcctgtaataccagcactttgggaggctgaggcaggtggatcaagaagtcaggagatcgagaccatcctggctaacatggtgacaccccgtctctactaaaaataccaaaaaaaaaaaaaaattagctgggtgcagtggtgggcacctgtagtcccagctactctggaggcagaggcaggacaatggcgtgaacctggaaggcggagtttgcagtgagccgagatcacgccactgcactccagcctgggcaacagagcgagactccatctcaaaaaaaaaaagtcacgattctgtgaatactcagttctgagttcgaatcttacctctgtgctcacactgctagcagaatgaccgggtaaatccctgtgcctctgtttcctcctcggtaaaatgggcttgatgctggccgggcatggtggctcacacctgtaatcccagcactttgtgaggccgaggtgggcagatcacctgaggtcaggagttcgagaccagcctggccaacatgatgaaaccctgtctctactaaaaatacaaaaattagccaggaacgatgtcatgtgcatgtaatcccagctactcagaaggctgaatgaggcaggagaatcgcttgaacctgggaggcagaggttgcagtgagctgggattgcgccactgtactccagcctgagccacacagcaagaatccgtctcataaaaaaaagggctgatgctgtccacttccaggccccattatagagatgcagtagagatcaggtgtgtcctgtacctggcactgggtctgatgcttaggaggccttcattcagtgacttgagagtgcttttttttggtggttatcaaataacaatagtgaacattcatgaagcagcagctacatgccaggcttctatgtctattgcctggctcagtgcccctaacaactctgtgaggtagatcctaatatctccattttacagctgaggacataaggcacagagaggttaagtaacttatccaaggccacacagctggtaagtcaagaagcagattccagacttgactccagaatcttatttgtaatcactgtagtacatggccttccagttctgctcaagagatagtggaacagttaaattacagactcagacaaaaaaaatcaaaaattaaaaaaaaatttaaaaacaacaaaaaataaaaagtatagactcagctagctgctgtaataaaaacaaagagatcccagggtagagtaatttaaataaaaaggacgtttagtccggagggtcctccaaggacccaggtaagttcttccagccccaaaatgagtttccagctctgggactgaggccgctgcaccagcagccatcatttcccaatcaggaagaagtggggaaagagtaggggacaagcaacaactctttgtaaaggcgtcacccagagatggtacagagcacttctgcttatatcccattggccggagcatggtcacataaccatctctagctgcaagagagtctgggaaatgtagtctctggctgggtggccatgtgcagtgctcatactcttaggggtttggttaccaagaacgaaacagggaggatggattctaagggagaagtaacagcctctgccacaatcaggattcttctctgagatccaggctgggcctggagtccctgggaggatagaaattggaggtctgggctgggcgcagtggctcacacctggaatcccagcactttgggaggccaaggccagtggatcacctgaggtgaggagtttgagaccagcctggccaacatggtgaaaccccatctctcctgaaaatacataaactacccaggcgtggtgctgcatgcctatagtcccagctactcaggaggctgaggcaggagaatcacttgaacccaggaggcagag[133 bp omitted]gaggcaggagaattgaactcaggagatggaggtctggcccctgctgtcgactaggagggtccgaggggctggaggagggtcctgggacagtggaacccccactgcccagattaccatagtgaatacaggtatccttgacctttacatctatccctttcctgattttagatggtgagagttcagatagcaaagtgtttgccaagttgatttggttcctgaggtttcggcaaatagcaaggaagtcacccaaaaatgtctgtgcatctattcagttgctgcgtttagagagaggagagttgtgataggagatgatttggagcgggtagagtttgaagaagggacagtttgaaggaggggtaataggagaggagagagtcagtaaaataatgctaggattgtatagtgcacagcctgcacaactgtacgttgcagccctgtctctgagttccaggctggttgcagtccctggtctcaggacaggaatgtgaagaatcaaagggactggggccctggcctgcctcagtcccccaccctgacttgtctgtctctgcccacagctcaggcaccccacgggtgccccctgcctccccctccagtcacagcctggcacccccatcaggggagcggagccgcctggcacgtggttccaccatccgcagcaccttccatggtggccaggtccgggaccggcgggcagggggtgggggtggtgggggtgtgcagaatgggccccctgcctctcccacactggcccatgaggctgcacccctgcccgccgggcggccccgccccaccaccaacctcttcaccaagctgacctccaaactgacccgaaggtgagctccgcggggatggcaggggcagggcggggcggggggccgatgggacctaacctgtcttccactctgctctgtctcctgtaccccaacatttcctcttcctcctcctcctcctcctcgtttcctcctcctcctcctcctttcctcctcccctgtcacccctcacctccctcctcacactgcagggttaccctcgatccctctaaacggcagaactctaaccgctgtgtttcgggcgcctctctgccccagggatccaagatcagtaagtcccgtccatgccctgttctcgctggctctgcctccctgcctgcatgtctgacctgtgtgtgcgggcattgggagggggctctgtggatgtgagggtctgtgcgtggggtctggttgttcatttactcacagaagcacagcctatggagccagactcgggggttcaaatggcagctctgccaagtgaccttgagcaagtcactcaaggtctctgggcctggttttcctcttctgtaaaatgggtatagtaataacaatacctgtctcctagggttattgtgaggactaaatgaagtgacgtatggactgagcgtagaacattgccttggaaagtgctttacatgtgtattagttattaattgctattattcattgagcccctactgtgtgcctggcactgtcctaggccctgtagtagagggtgagcaaaatgtacaaaactcctgccctggcagacccaacattctactaagggatctagacaaaaaacaaagaaataagtaaaatatacttactatatagactgctaggtagtgcgaagtaactaagaagaaaaatagagtaggagccaaatttggtggcttatgcttgtaatcacagcactttgggaggctgaggcgaggggatcacttgagcccagaagttcaagaccagcctggacaacgtagcaagatcctatctctacaaaaaagtaaataaattggccgggcgtggtgactgcacctgtattcccatggaattgggaggccgaggcaggaggatcacttgaacgcaggaggtcaaggctgctgtgagctatgatcatcagtcttggcaacagagggagaacctgtctctaaaaaaaaaaaaaaaaaaaaaaaaaattgaacagggaggggaataaggggtgtggggaagggatggggtgcagcattaaatgggcaggcctctggatgaggtggctcaggccagcaatcccagcactttggacagatgacttgagtccaggagtttgagaccagcctgggcaatgtggcaaagccccatctctacaaaacaaaacaaaaaacaaaaagcagatgtggcacgcgcctgtagtcccagctacttcaggggccaaggcaggaagattgcttgagcctgggaggttgaggctgcagcgagctgagatcacgccactcctgcatgacagagtgagactctgtctcaaaaaaagaaaaaagggcaggcctcacgaaggaggtgttgtttgagcaaagcatgaatgtatatgtgagcgagggagtgtgtgtgtgtgcacacgtgcgtgtgtctctctctttctctctgtggccacttatctatgtaagggtgtgtctctgcccactcccctccctttcatcttccacattcttcagtatctttcctgtgacctgcactaaccatttcagaatgagccccgttatggggatggacaaggagatcaaatcctgactccaggccctcaccagcccggagggactggggttgaggcaggggctgcttggagtcccagaggcagtgggttgcgggaggtgggttccctatgtccagattagacactctgtccccctcccctcccctagggtcgcagacgaacctgagagaatcgggggacctgaggtcacaaggtgagtgcttgggcctacccctgactgccacttcccctctcctgcctcagcacctcccgacacttaccccagggcattagatggggccccagtctcatcctgcaaggccaacttcctgaaatgccctgtggccccagccttctctgccagctcctctcattcccacccaaccccaagcaccttcccttgatcatcttaaacttcagcctccggctgggtgccatggcccaagcctgtaatcccagcactttgggagtccaagggaggcagatcacctgaggtcgggagtttgagaccagcctaagatggagaaaccccgtcgttactaaaaatacaaaaattagccgggcgtagtggcgcatgcctgtaatcccaactactcgggaggctgaggcaggagaatcgcttgaacccgggaggcagaggttgcggtgagctggattgtgccatcgcactccagcctgggtagcaagagtgaaactccgtctgaaaaaaaaaaaaaaaaaaaaaaaaaagcctcatcccatccacaactcaactcctcttctggtcaatgcccccacctccttttgcctctcatccagtcatggcacaatgtttgctggcagctcagggccagcaggaggcaaacatctgtacggacccagatcatgaagattttaggctttgagggccaggcaccctgtgtcacgcctgttcagttgtgccattgtagtgcaaaagcagtcatattcaacacaaaacaaatgggtatggcagtgttccaatgaaactttatttacaaaagcagacagcactggagtttgccaagccctggttttgtctgagttcccggtttagagacccaagtggaaaccggagccttcccagcagctgcaacaaactgccagggctgactctcattggttgggacttggtcacatgctcattcctaaaccaatgcctgcagccagagaggagaagtactctggttggtcagacctggtcatgtggtcacccttgacccaagcacagtggccgggaagtagaatgctatcattggcagagctgagtcgtgctcacccaagctgaggggcggccccaccggaacaagggaggctagtcctgggatgctcatgtagagcagcactctcgtacttcaggcgggacgtttctttgttgtgcagggccctcttgcacattggagaatgtttttcattcctgacctaccccatccccaacctagtcagtgccagcagtgctcccatcctaagacatgtgacaatcaaaaagcccccagaggccgagcacagtggcttatgcctgtaattccaacaactcaggaggccaaggcaggaggatcacttgagcccaggaggtcgaggctgcagtgagctgtgattgcactactgcattgcaagaccctgtctcaaaaaaactaagaagtggccgggcactgtggctctcgcctgtaatcccagcactttgggaggccaaggcaggtggatcacctgaggccgggagtttaagacctgcctgcccaacatggtgagactccgtctctactaaaaatacaaaaattagctggccgtggtgcctgttctcccagctacttgggaagctgaggcaggagaattgcttgaacccgggaagcagaggttgc[132 bp omitted]gcgggcagatcacaaggtcaggagatcgagaccatcctggctgacacggtgaaaccgtgtctctactaaaaatacaaaaattagctggggccaggcgtggtggcgcgtgcctgtaatcccaactactcaggaggctatggcaggagaatcgcttcaacccaggaggcggaggttgtggtgagccgagatcgttccattgcactccagcctgggtaacaagagcaaaactccgtctcaaaaaaaaaaaaaaaaagaaaaggaaaaagaaatttctcattcaaacattcaaaccatgtggccaagccaggctggtaaggccactgtgatctatgcggtcattcaggtccccaggttattgcatcccgattccctggagcccttgtcatcttcacagttgaggctggcctgtgccactgctaagtccagctcctgggagatgtgggacaggagagcctggcacatgcaggttctttgaaggaactgatgtggatggcacatctcacttctgctcatgtcccagaatttacagacaaggtcacacctggttgcaagggaggctggaaagtgtggtctctagctgggcagctctgtatccagttgaaactgtcgctggggtaacaggggaagatgttttttgaggggatggctaggaatgtgtcccgaattgggaagagttgtcccttcagccctccaccacattcctcttcgctcccatctctgacccctgacatcttctcgcctcagttgccatctaccttgggatcaaacggaaaccgccccccggctgctccgattcccctggagtgtgaagctgaccagctcgcgccctcctgaggccctgatggcagctctgcgccaggccacagcagccgcccgctgccgctgccgccagccacagccgttcctgctggcctgcctgcacgggggtgcgggcgggcccgagcccctgtcccacttcgaagtggaggtctgccagctgccccggccaggcttgcggggagttctcttccgccgtgtggcgggcaccgccctggccttccgcaccctcgtcacccgcatctccaacgacctcgagctctgagccaccacggtcccagggcccttactcttcctctcccttgtcgccttcacttctacaggaggggaaggggccagggaggggattctccctttatcatcacctcagtttccctgaattatatttgggggcaaagattgtcccctctgctgttctctggggccgctcagcacagaagaaggatgagggggctcagcggggggagctggcaccttcctggagcctccagccagtcctgtcctccctcgccctaccaagagggcacctgaggagactttggggacagggcaggggcagggagggaaactgaggaaatcttccattcctcccaacagctcaaaattaggccttgggcaggggcagggagagctgctgagcctaaagactggagaatctgggggactgggagtgggggtcagagaggcagattccttcccctcccgtcccctcacgctcaaacccccacttcctgccccaggctggcgcggggcactttgtacaaatccttgtaaataccccacaccctcccctctgcaaaggtctcttgaggagctgccgctgtcacctacggtttttaagttattacaccccgaccctcctcctgtcagccccctcacctgcagcctgttgcccaataaatttaagagagtccccccctccccaatgctgaccctaggattttccttccctgccctcacctgcaaatgagttaaagaagaggcgtgggaatccaggcagtggtttttcctttcggagcctcggttttctcatctgcagaatgggagcggtgggggtgggaaggtaaggatggtcgtggaagaaggcaggatggaactcggcctcatccccgaggccccagttcctatatcgggccccccattcatccactcacactcccagccaccatgttacactggactctaagccacttcttactccagtagtaaatttattcaataaacaatcattgacccatgcctactccatgccaggcccagtgctggacacagagacatgaagctctgtctgtgggagacagggattctgacacagacaccggacaaaccattgtcttggggagcccagaagagaaagtgggcagggtggggtcattggggaagatgctctagaggaattaatgctggaatggggtgttgaaggatgagtaggagttagttaggcattgagtttgccctgggcaaaagcccagaagtgggagtatgtggtatatcttcagagaactgggtaatttcagtgtggctgctgtgttgggcatggatggagaatcagcaagagaaatgctgtattaggactaataatccatctacgctgcttaagcaaaaaggtatttgttggtttatgttacttaatagtccaggggcacctggcttcaggtaggtttgatccaggcatcaggccattgcatctattttttcagtgtaagttgaattctagtaatttttatcaagtaagggctcctttcctggtggcacagatgacttcagcagttagaagtttctatccctccagctttctgcagcagaaagaccctcattgtcagtttcccagcaaaagtcccagggcagactctcattggcccaaatgggccatgtgattttctctaaaccaatcactgtgactctagagtggccagactcagagctgcacttagtaggggttcctcaaaggaaggtcaagtgtcatgagcaggagaaaaggcatgggagctggacagattatagtggttgaagtctgtgcagtacagaagggcggagcttattcacacagcacctttggggccaaaatgaataagctggactttctccccatggcactggggaaccatggaagttcagggaacttcagggaagaggcttggtcaattcctgagagcatcctctgtgctggggacacagtggtaatcaagacagccccaacactgccctcatagagctcacagtccaatggaggaggcagatgtgtcctcaggcagcgactgggcagggctggtataggggagtccagaggtgatgcctgcctcagccagggagggcttcctggaggagaaggagccagctagacatggataggagtgcgttttaggcacagcaaatggcacatacaagggccagggagcaagagagaggacaggtcctcaacaaatggcatgtgactttgtaagtgtagaattgctgtgaggtatggggctaggggcgtcagtagggccttgaaggttatggacaggggcctgggctttcttccaagggcactgggggagccatggcaaggttgtaggtagggtagagatgggcgggtttgtgctatgtgcagggtggaagggagggaagttgacaggtcagaagatcaggaaagaggtcggggctggacagatggggagagcgcagatagatttaagagagtcctgtgaggcaaagtgggcaggacctggtaacaggtgtctggactgtggctttggctggctcagaaggtccccactggcgtgtgtggtctatgtagcctctgggtgtggagctgggatcttcaactggggacagtacagtaaagaacatcacagcatctcacaggttctgcataccttaatgtttagaatctctcctaaccttccttgtagtaatctccctgggaacttttggggacatccctaggcctcaatttcccctctgtaaaacagagggcagattgaactacaagggcccttaatctctgtgactcttgaggtttgaaaaagcaccttaggttcctgagggctttgtcggttcttccatttactcccacctcacttttttttttccctaaaacgtttgtcttttggggcccaccgactgtgtccttgttaacgtagacattggcctgtttgactgggtggaggtgattgacgtgcccaacacccaatgcatgttcagctactgcttgacttctattaactcttctccctccaccaattgctctaccacacctctttcctgttccttcctgggactgagttctccaaaaggcctatccctaaagacttcatggggatgctcagactcacagattggagagggaaacagcttggtcaaagacattgaggtgggaattggagggtgtcaggtgtgaaagaatcagaggagtaatggggaaagaactggaaaggtgagcctccagcaaatggtatgcatttcagtgtggccttgagttgcaaaataacagaaaagctttctaggagaaatggggagccatggcaggttcttgagaaagtaagggactggcagcagctacagagggatgaagtcagacgggacagaaggaggccactgagaagcagaatataggtagatgtgacgagctgcatgggaggtctcaaaactggagaccgttgggctaaattcaagtttcagacatttcgtttggctgcattcctccccagcgtggacctcgtgtttgagatctgagcatgactaattcaaagccatagttggaaagggcccatgctttgggtgagtgacactgggctcagtgtctctctgggtctcagattccccatagagccttctaatttttggactagattctgtgacctaactttgcctcattttagacccgggataagacatgtttagtacatgcctagacaggacaaaccactctgagaccacacagtggccaattgcacgtcctccctcaataactatcgcacaaagctaaggccaccaatgcttttatttatcgctttgcgtggagacaaagcacaagctccgagtgtgctgggagctctccattaactagagctcctggttggggtggagctctgggaaaagaagaggaccctgccagggagatatttcattggccagaatccagaggatggagcccattggttggaactctggttgaaactggaactctgagaagggtggagagagcccccaggtgggactctgggacagggggcggggcgaggagtgagggagcaggactctggtgggccaggccctcccactggctgggttccagcagtcggtggcaggtgggcaggcgcctacttctgggcggggatcatgtcgtcaatggactggcctttctccaacttcttctccatttccaccatgagcttcacaccatccaccaccagctgcacctgttctacttcggacgagcccagccgatcagcgttggacacgtcaaatactgagcccacggcagctgtgtccacgccacctgtgggagcaagggacaggggcgtgaagaggcagcgaaggtgcagaggggctgggacgtggcccccgtgccaaatgcaacagccgcatgtagtgagtgcctactgtgtaacaggttacctgcacacaggtaatgcctgttcattcgtgagctcacgagtctctgacttcagatggggtaccacgccactcagttatcaaacatagtatagtgggtaagagagtgggttctggagccaggcggcctagggtcgaatcctgaccactcctcgctttataaatggggaaactgaggccccgagggaggtccaagggcatgtgcaatgcatattatataatcatgaaaatcccacattgactcctatcacataggcatattgacacccattttacagaggaagaaatgcaagctcacagagggtcagcccttgccggatccccagaactcgcagggatgtcgcacctctccttgcatccctgcaaagggccctcgctccccctccgtcgtggtgcaaaggatgtgggagccgtacctgtacccctcttctgcagacgcaggcgggtgaggatctcctcgaacttggggtgcttgctcaggtgcgccagcttcacatgcacgcctccacgcagcccagtgcccaggttggatgggcaggtgagcacgtagcccaggtgctggttccacatgaaggggtggccagctttcttaaagatctcctcaatctgaggttcagagagaggaccaggggtcagcgccggcaggcacccccaaatgcacccgcaacatggacagggtccggagggacagggcgtgggaacgtggtggaggtgggattctgaggggaacagggaggtaggagattccgagggtgctggctagacaatggggaccaaggcaggattttgaggggcggggactaagaacgctttgaaggcgggttttttttttttttttttccagagtctctctgtgtcacccaggctggagtgcaatggcgtgatctcgtctcactgcaacctctgcctcccaggttcaagcgattctcctgcctcagcctcccgagtagctgggactacaggcgcgcgccactacgcctggataatttatttatttattaattttttagtatagagac[139 bp omitted]gctgggtccaggggcggggccctgaaaagcgggtggggctagttttggggggcggggtttggcatggggtggagccaggtccggggggcagggccctggaaaatgggtggggcagggcttagtataggggaaggggcggggcctcggaaagcaggtggggcgttcaaggtggagtcagaagtcagcagctaagggcagacacccaccttctgcagccctacgcagaagcggcggaaaacctccttcatgttgccccccttctccatggagatgacccggaggtgatcctcctcgttcacccacaccaggaagctcttgttgtcattgtgcctagagtaaggtgccgcagcaagaggccaaggtgtcagccccgtgggaaccccattcccagccctcccccaaaacatctgcccaccgatgggggaagagggcctgaggggtgggaggtgggtggcatctgcctcctcaaaacgcagaagcttaaacctgtagactctaatgtcacaggatctgcaaaacgctgaatcctgggatcaaggacttttagggacttaagtctttgaacagtattattatagatccttgggatctcaggatgtttgacaaacagaagcttgggatcagaactgataacacttggtaatcctacatctggtttcaggaccagaaaatcttcccatcgtagtgtgttagctccc[151 bp omitted]cctgtctctactaaaaaatacaaaaaaaaatctgggcatggtggcgggcatctgtagtcccagctactcaggaggctgaggcaagagaatggcgagaacccgggaggtggagcttgcagtgagtcgagatcgcgccactgcactccagcctgggcaacagagcgagactccatctcaaaaaaaaaaaaaaaaaagaacataaaatattaagatccggaaatggccgggtgtggtggctcatgcctgtaatcccagcactttgggaggccaaggccggaggattgcttgagcccaggagttcaagactaccctgggcaacatggcaagacccacatatctacaaaatttaaaaaattagcaggcatggtgggacacatgcctgtagtccaagccactggggaggctgaggcgggaggatcacttgaccttggaaggtccaggctgcagcgagctatgatcccaccactgcactccagcctgggcaacagagcaagaccctgtctcaaaaaaaaaaaaaaaaaaacctgagggcaggcatggtggctcacgcttgtaatcccagcactttgggaggctgaggtgggcggatcacttaaggtgaagagttcgagaccagcctgagcaacatggcagaacgctgtctctaccaaaaatacgaaaactagctgggcacagtggcacatgcctgtcgtcctagctactaaggaggcggagggtgagaggatcgtttgaacccgggagatggaggtttcagtgagtcgagatcaacccactgcactccagcctgggcctcagagtgagagtccatctcaaaataaataaataaataaatgagtggaatcttaaaacctaaaaatatttaaaatcttgaaatcttagaatcatcccatctgtatatcttagcacccaggctcccttcatcgattgaaacctaggttctctaaatctttgactatctgaatcagggattcaaagagtcaaaacaagtctagcaataatactttataataaagat[134 bp omitted]agctccgcctcccgggttcacgccattctcctgcctc[224 bp omitted]tcctcacaagaacaccagaaactacaaattattgtgatccctatcctatagctaggaaactggggtagagaaaaataaaataagttgcccaaggtcacaaagctagtaaagttagtaaatggtagagctgggatttgaacctagggagtacggttcaagtctgagttcttatttttgagacaggtagctggagtgcagtacctcggtcatgattcacagtaacctcaatcctctgggcccagctgatcctcagcctctcgagtagctgggaccacaggtatacgccatcacgcctggcttttttttttttttttttttttttttttttttgagacggagtctcctgtcgcccaggctggagtgcagtggcacgatctcagctcactgcaagctccgcctcttgggttcaggccattctcctgcctcagcctcccaagtagctgggactacaggcgcctgccacgacgccgggctaattttttttttttttttgtagttttagtagagacggggtttcacc[140 bp omitted]tgcccaggctggtctagaactcctgggcacaagcgaccctcctgctgcagcctcccaaagtgctgggattacaggtgtgagccactgtgcccggccaagtctaagttctttcttttttgtttgtttttttttgagacagtctggctctgtcgcccaggctggagtgcagtggcacgatctcggctcactgcaacctccgccacctgggttcaagcgattctcctgcatcatcttcccaagtagctgggactacaggcgcctgccactacgcccagctaaatttttgtcatttttagtagacaccgtgttggccaggctggtctcaaactcctgacctcaagtgatccccccgccttggcctcgcaaagtgcagggattacaggcatgagccaccgtgccccgccaagtcttaagtttttaactaccacttctccggtccagatatcccaaaatctgacacacagaccacaggatgggcaggggcggagggcaagatcattttccgtggcatttagaagatcataattacgtatatggccttggttttggtggaggagtgaggagggccgttgcaggactggaggaggctgggggaagaggaagccagggggcggggaggggcctcaccagatgccacgggcgtcgggccagtcgcgggccatgcctgaggccagcagcagcggggacacgggcttgtcgaacaggaagtggtcatcgatgagctgctgctgctccttctccgtcatgctcttcagagggtagtacttccctttgaactcgcccgtcaggctgttgagagctatggggacacacgagggagtggtcagcagcctgtcccacctcaaccagggtgtggaggcccagggtttcccctgctgctgctcctaacgggcctgggccttggccccctggatgtcctaaaggcacctgaaccctgtgtctaaacccacacttgtgacggctccccaaaatctgttcctgccatctgtccaggcccccaggaatggccaccccatgtgctcaatctggaaaacagacccacctcttcccctgagggaccctcacatccaatccacctgcaggccacagtgtgctggtgcctgctcctaatggctggcaacacagatggctgaagtctcaggactttgagaggccattagtaaaaattattataaagtagaatggtagccaggtgcactggcacgagcctgtagtccagatactggggaggctgaggcaggaggatcacttaagcccaggagttcgagtccagtctgggtaacatagcaagacccccatcttttttttttttttttatgagacggagttttgctcttgttgcccaggctggagcgcaatggcgcgatcttggctcactgccacctccgtctcccgggttcaagcgaatctcttgcctcagcctctcaagtacctgggattacaggcatgcgccaccatgcccggctaattttgtatttttagtagagacggggtttctccacttgggcgcctggcccaagaccccaatctttaaaaaaaaaaaaattgtaggctgggcgcagtggctcatgcctataatcccagcactttgggaggccaaggcaggcagatcacttgaggtcaggattttgagaccagcctggccaacatggtgaaaccccgtctccactaaaaatacaaaaattagtcggccatggtggcacacgcctgtaatcccagctactcaagaggctgaggcacgagaaacacttgaacccaagaggtggaggttgcagtgagctgagattttgccactgcactccagcctgggtgacagagtgagattctgtctaaaaaaaaaaaaaagaaaaaaaattgtgtgtttatttgtatattcatgtataaaatatgtgtataatgaatttgtgtttgtgcatatgtacaataaatctataatatttatatatcttatacatattcatataatatacagacatacctcgttttattgcattttgcagatactgtgttttttacaaattggaggtttgtggcaactctttgtccagcaggtctattggagccatttttcctacagcatgtgccacttcgtgtctctgtgtcacatgtgggtaattctcacagtactgcagactttctcattattactatatctgtcatggcgatccgtgatcagtgatctctgatgttactgttttaattttggggggtgccaccgaccttgcccatataaaagggtgaacttaatggataaatgtgtgtgctcggactgccccactgaccagccattccctcatctctccccatctccttgagcctccgtattccctgagacacatgattttgaaatcaggccaattcagttcataaccttacaatggcctcgaggtgtt[131 bp omitted]agaccagcctggccaagatggcgaaaccccgattctactaaaaatacaaaaattagccaggcgtggtggcgcatgccggtgatctcagctacttgggtggctgagacacgagaattgcttgaaccacgaggtggaggtaacagtaagccaagattgcaccactgcactccagcctgggcgacaagagtgtggctccatctcaaaaaagagattcttttcaaactattactgctggccaggcactgtggctcacacctgtaatgccagcactttgggagaccaacatgggaggatcacttaagcccaggagttggaggttatggtaagtcatgattgcaccactgcattccagctgggcaacagaacaagaccctgtcttgaaaagagagagagaaagagaaggaaggaaggaagggaggaagggagggaggaaagaaggaaggaaggaaggacggagaagaaaagggaagggaagggaaggaagggagggagggaaggaagggaaggaagggaggaagaaaagaaaggaaaggaaggaaggaaggaaggaaggaattgccgcagccatctcaaccttgaacgacaaccgccctgatcagtcagcagcccatcaacatcaaggcaaggccctacacaacagaaaggttccaacttgctgagtcctcaaatgatcacaacatttttagcaggattttaaaattaaggtatgtacttttttttttctagacataatgctattgtgcacttaacagactacagtataggataaacataacttttttttttgagatggagtcacactctgtcccccaggctggagtgcagtggcgtgatctcagctcactgcaacctctgcctcccaggttcaagcgattctcctgcctcagtctcccaagtcgctgggattacaggtgtgtgccaccagacccagctgatttttgtatttttagtagagatggggttttaccatgttggccaggctggtctcaaactcctgacctcaaatgatccacctgcctcagcttcccaaaatgctgggattacggtgtgagccactgtgcctggcctctttttatttgtttttgaggcaggttctcactctgtcaccctggctggagtgcagtggcacaatcacgattcactgcagcctcaacctcccgggctcaagtgatcctcccacctcagtctcctgagtagctgggatgacaggtgtgtgccaccactcctggctcatttttgtcttttttgtagagacagggtcttgctgtattgcccagtctggtcttgaactcctgggctcaagcgaccctccctcctaggcctcccgcactgctgtgggagccactgtgcccggcctcaactcctcctatctgaggtggctcccctcggtcattctccaccacacccatgtcttggcttcatggcacttttgaattatcttgttcatctgtgggtttctgtatttcctcttgtctccccaccagctgaacactctgtgagaacagtgagggacccctatctccccacacagggcaagaacccctggaaatgtgtgctggatgaacggatggcaggacgctgggggcagccaggtgtctgcgtaggtcttctcaggggccgtcgggtctggacagcatccctgaatctccaacacagcaggtaatgctgacagcccgcgccattccccaagcccccacgatttaccaagctcttcccctactttgaaaagcgggggcccaaagagacccgaggacctgcccatggaggaacagagccagggctgggtgaccccagcagtggacggggtaggggcgctcaccttccacagagagcttctccaccgcccggcgctcgccacgggagcagtgtgggggcaacgtgtagcccttgatgctgcggccagtgcggacgcggctgctgagcacgtagttagggtccaggtcgtctccaccctggagagcgggtgggagatcaggaccaggcagatcctccgccctctccagcaagcccaggtctcccccagatgctcccctcagtctccctgttgcttcctttgccttctgcatcctcactgattgggtgtgtggagcctctccccgccacccatacctgggctctgtctctcccttctctgtctctctcccctctcctatctctgtttttctttatacctctctctccccatcttcgtatatttcttttccttttttttcttcgagacagggtctctctctgtcgcccaggctggagtgcagtggtgccatcatagctcactgcaacctcaaactcctgggctcaagcaattcccctgcctcagcctcccaagtagctgggactaacaggtaggtatatgccaccatgttcggctaacttaaaataaattttttataaatagagacaggggctgggcgcggtggctcacacctgtaatcccaacactttgggaagccgaggtgagccaatcacctgaggtcaggagttcgaaaccagcttggccaacatggtgaaaccccatttctactaaaaatacaaaaattagctgggcgtggtggtgcgcgcctgtaatcccagctactcaggaggctgaggcacgagaatcacttgaacctggggatcaggggtttccgtgagctgagatcgagccactgcactccaacctgggtgacagagtgagattctgtctcaaaaaaaaaaaaaaaatagagacagggtgtcactatgttgcccaggctggtctcaaactcctgggctcaaacagtcctcctgcctcagcctcccaacgtgatgggattacaggcatgagccaccatgcctagctaaatttttaggcttttttttttcttttttttgggcagagacgggttcttgctatgttgcccaagctggtcgtgaactctcctggcttcacgtgatcctcacacctcagcctccataagtgctgggattacaggtatagccactgcacccagcctttctgcccatttctgtttctcttcctgtctccctttctcccactctccttgtctgtgtctgactgcaactgcgtgtgtctctctctccctgtctctcctgccttctctgatgctcccttctgtctccctctgtgtctctgcctctccccccacccttttttttttaggcagagtctcgctctgtcacccaggctgaatagctaggattataggtgaacaccagcatgcctagctaatttttgtatttttaatagagactgggtttcaccgtgttggtcaggctggtctcgaactcctgaccttatgatccgcccacctcagcctcccaaagtgttgggattacaagcgtgagccactgtgcccggctatgcctcttccttttctacatgcttttgtgcctttcttctccctctccctctcctttgtctgtctgtctccttggttgtctgtgtctccttggctgtctctgtgtctctctgtccctctctctttcctttttttattttctgagatagaatcttgctctgtcacccaggctggagtgcagtggcatgatctcagctcactgcagcctccatctcctgggttcaagagattttcctgcctccacctcctgagtagctgggattacaggcacgcgccaccatgcccagctaatttattttatttatttatttatttattttttgagacgagtttcgcccttgttgcccaggctggagtgcaatggcacgatctctgctcaccacaacctctgccttccaggttcaagcgattctcctgcctcagcctcccacgtagctgggattacaggcatgtgccaccacacccagctaattctgtatttttagtagagacggggtttcaccat[140 bp omitted]ccaggctggtcttgaactcctgacctcaagtgatacgctcgcctcagcctcccaatgtccctctctctttccatctctctgcttctccacacctctgtgtctctctctgtctctgtatttctctgtctccccccatttctcctgtgatctctctcctcctcacccctcggccctcccctcctgcgcagacaccgaccttgaggttttcatggttgaggtcagtcttgtgcttgtcagtgggtttgtagcccccgtggcgatccgagatgatggggtcaaagagttccttgaaaacttcgtaggactcctcatcaccagccacgcagcccacggtcatgatgaaggggtgacctggaggggtgggggtgaggtcagagctgcttgtccccagcaaacagggcgtgggcttgtgggctcagtggagcctgtgtggacatgtgtgtcgggatgggggcgggtacattcaatacctctgggtgggaattgagaatcataagggttgggcacagtggctcatgcctgcaatcccagcactttgggagggtgaggcgggtgaatctcttgaggtcaggagtgtgagaccagcctggccaacagggtgaaaccccatctctgctaaaaatacaaaaattagctgggtgtggggcacacacctgtaatcccagctactcaggaggctgaggcatgagaattgcttgaaccaagggagtggaggttgcagtgagccaagatcacaccactgcactccagcctgggtgacagagcaagactctgtctccaaaggaaaaaaaaaaaaagagagaacactgaggactggtgggaactgggagggaaggctgggagaggtcaaggtggctgggaggggtcaaggtgggagagaagaaagagtgctgggggcggggtcaaaggagaaaggggagcttcagagggtacatggtgctaaaagcatcagcacctcggaaacattagcacccaaagtcatgacatcttagcctgaaatgttaggatctcaggctaccaccgtaccacagagggtcaggagggtaagagacttgaaagaccctcttgtttcccagtggaaaaacaggggccaggagagaggggcttctccccggcatcacacagtgagctggatgtgaggggcactagagcctcccctccactcccagctctcttcgccttgcaatgtcctttgagaaacaaccataacattaataacatcccctgtcagattctttttttttttttttgagacagggtctcactctgtggctggagtacagtggcgcgatctcggcttactgcaacctgcacctcccaggctcaagcgatcctcccaccgcagcctcctgagtagcttggaccacaagccctcatcaccacacttggctaatttttttgtattttttgtagagacagggtcttgctatgttgctcaggctggtctcaaactcctggcctcaagtgatcctcccacctgggcctcccaaagtgctgggattacaggcatgagccactgcacctggcccccctgtcagagcttgagcactcacttggtgccaggtgccactctaagcactgcacagccattgacttgtgttttcacaacgtgggcgcccatttttcagatgaggagactgaggttcaggaggtgaaccgacctccttggggatctcacattattctcgtgcatgtttattgcgtggtttgctgagtacctcgcactgtcccaagcctttatgtatattaatgcattgattcccacaacagccccattttacagatgagaaaactgaggccccccccccttcaagggtggtgggattggggcatggccggcagcctccagagcccccatgtagccccttcagtgctccactggggaggctcacctgggttgtccactcctgtctggatgacatcgtctacagtgaagccagatggagtctccttgtcccgcagcttcttgtagagttcaagggtcagtaccttggccatgtggttgttatgtttgctgaggtcggggtactcctcctcaggcttgtaattcagcttgaacttgttgtgggtgttaccgaatggcatggtggcggtgtaggagacctgatgggcagggcaggaggggaagattgaagattagctggcatcttttttcttcttcttcttctttttttttttttgagacggagtctcgctctgtcacccaggctggagtgcagtggcacgatctcggctcactgcaagctccacctcctgggttcacaccattctcccgcct[221 bp omitted]ccaggttggagtgcagtggcgagacctcggctcactgcagcctccacctcccaggttcaagagattctcctgtctcagcctcctgagtagctgggattacaggcgcacaccaccatgcctggctaatttttttgtatttttattagagatggggt[153 bp omitted]aggcgttggggtcaggcaggctgtgtaacttggagcaagagaaatcctctctctgagcccctgtgtctcagcaggaaggcatccggagtcttagatcaagggcctggctctgccgtatcccagttgggtgagcctggactagtcattcttgctggaaactcaatttccccaggtggaaaacgggcccctcccggaggctggaaaaatattttgtgtgggtaagagtgtaggttctggaatcagcccagggtttgattcccagctctgctacctacaaccagctgtgtggccaggggcaagttgcttaacctctgtgcctcaatttactcatctagaaaatgaggatcctaacagcacttgccgcatgggagtgttgaaaagattaaatgtgtgaatacaggtgtagctctcggaacagtgcctggtacac[133 bp omitted]caagcaactatcctgcttcagcctcctgagtagctgcaactacaggcgtgtgccacacctggctatttttttttttggtatttttagtagagttggggtttcgccatgttggccaggctggtcttgaactcctgaactcaagtgatccgcccacctctgcctcccaaagtgctgagattacaggcatgagtcacggcacctggcctgttgttgttattttaaaggttcgtgcgaggagctggtgagaaggtggaggtgagggtgctgctgggagtatgtgagcaggttcttggattatcaatccaaagacaaagggctgggtcgggggagggctgggtagctgcccccacctctgcctgctgacagttctcccacagggctcagaagggaagaaaagctcagcctctgggtcgtcagaggcaggttcaaatcccacctatgccatttccctgctgtgtgaccccaggccagtcactaggcctctctggacctctgtctcctgtgaactgagcctgccccgtaggattgccaggatcctctgagcttggccatgaggttggctgagcacaggccctggcatggagttggagcctggaaccctggtggctgctattattgttatttgttattactacttttttgcagagatggggtctcactatgttgcccaggctggtctgggactcctggcctcaagtgatcctccagcatcggcctcccaagatgctgggattatgcgtgtgagccactgcgccaggtcctactgttattattattttattcactggacccagaaaggagaagggacccagaaaggagaaggggcctccagcagcggtgggagacggggatgggaagcaggtgggattgtgggagggagattgggaccacggtgagctgaagccagggaagaggaacagggacccgccaaagaccttgggtgctgctgtccagggtggttatttttagaatctggcaactgcctgccatcccacccccagctgctgccccgccccacccccacattccggggctcggcttgcaccaagtcagcaggcccaagacaggtgggccagggtggctgggaggacacgggtccaggcctcggggctcaaggacatcctgggatggcagcccagaccccctcccttcagaggatgcccccctaatccctgccagggacaccccaggagagggcactgaggcagggtggtgaccccccccacaagagacataagcagaaagccccagagccacacacccccaccaccgcagactccccagatcacactgtaaactaagtcacacagtcacacttccaaactcaaggacatgcccaggacactcatgtgtccgctactaagtcagaaacaaggtcacagggacccacacagtagcaaacgcaaagaaagcctgcgacacctgctcttgcagactctgctaggcgacagacacacctcccacggcttgtggcgccagtgttggcgacaaactgtaatgaacacaggcctggctcaacagccccttgcagggggtgacagttggcagctgtcaggacccctttcatctcggatccctccccataacccaagacttgtgccgcagaaatcacaggtcccagtggggggttcaggcagcctcacagatggaggggcctcccagacacacaagggtcaaccttcccacgcaccgacctgcctttgtataggaggatgttggtggagcaaggggtgacacacagaccctttcccaagccaagcctctagcacccacagaaatcccctactctggcccccacccagattcccgccccgtgcagtacctggctgggctgggctgaaggggggctgtctgtatcctggaggtgacactgacccaaaggaagggccagcagccgtggccttatatagggggacctaggctgtgctattggctgggaggggttgtccccagggaggagttctggagggcagctgagcctctcacctccctgctcccgcaccatacccaccctgaacccaggcatgctttgcgcccagccccatggccttgtatgggctgagccgccccaggggctgggctcacgcccccccaccaagctgataccctgaccaagtgctgagttgggctggcggtggggacagctggccccccgccgggaacatgggacggtggctgggaacgtcccaagcacgtagaagccaccgtcccctggcccctgagtctccttcagccaccagcccttcctgtggccctcggctccccctgtgccccctgggccctcacccctacccgagtcccagcggcacctcggggaaccaaggtgtggctccaggaggagcagataccctgtgagctggaggaagcagaggccgggagaaggaccaattgcaatggagggcagtctaaccccagaaacccgcgcttgggcgccccttcctcctagggactgagtggaggggaaactgaggctggctgagttggagagattcaaactcagggcaagggtgggaggcggtggtcaccctcccccccacttaaccctcgccccctcggtgccactgggagatttccgctgtgcgggggacagggagggtctcggtcgccgggaaaggagttatttttagagggcgctttgctgtctcctctgccgcaaaggccgagacccgaggcgctgggtatgggggggttcgggggcaggtgttggaggggggttcgccacgtgtcctggttaattataaccgggcgtctcgggtgtcctcgggcctcgcctccttacaagggcagccacggggccctgggtggccgctcccacctcccggggaagggggctgggcagcgacgccgttcagagcgcgggcgccagactcgcgcagatctgggcagagcaagcgctctcggcgcctcggctgtgagcaaggacttccagggctgagaggggggttctgtggaggagagtacagtatagaggaagccgctttctcctcctgggacgcgccaggattgcaggctgatcgggtctcctcctccagggagctcccaggattgcgacgaagaaaagaatgtcccttccctctgagttcctccctatcccagggtctcctgggtctccttcacatcttcttaggcaggtgaggactggcttagagaaagggagcctctgtgcctctccctcagactcctgatctgaggggggaggggagaggggtgctttagaaatatttacatggggcccagccctttcccagcaagctcagattgccgagggtctccttcacggttacggaaactgaggcccagaaaaccaaatggaactggtctcgaaacagggatctatcaggcacttcctgaggctacaacaaaacacaaaacccccgccgtcctggaggtgatagtgcaagagggtcacagatgaggggacggcacagcagcaggggaggtcgaggcaggcctctttgggaagatgacatctgagcagagacctgaaggagaacagggagccagccatgtgcggctctggggggaacagcaggtgcaaaggcgctgaggtgagaatggctgggcacatctgaggacagacaggaaggaggccaggggactggagcagatggggccaaggagagagtgggaggaagaagatgaggttggaggggagacaggagcagacccatggtgccctaggggctgtgggaggagttttaatcccattgtgattgacagtgaaaatgttagatgggccgggcacagtggctcaggcccgtaatcccagcactttgggaggcagaggcggaggcgggtggatcacttgaggccaggagttcaagaccagcctggccaacatggtgaaaccccatctctactaaaagtacaaaaattagcctggcatggtgacacacgcctgtaatcccagctagccaggaggctgaggcataagaattgcttgaacctaggaggtggaggttgcagtgagctgagatggcaccattgccctccagcctgagtgacagagcaagactcagtctcacaaaaaaaaaaaaaaagaaaagaaaagaaaaagaaaatgttaaatgaaccaggtatagaaagacaaacatcacaagttatttgtgggatctaaaaatcaaaacaaggaggctgaggcaggaggattgcttgaacccaggcagtcgaggctgcagtgagctgtgatcgagccactgctgcactccatcctgggcaagagagtgagaccctgtctcacacacacaaaaattaattaaaataactaaaggagtataattggattgtttgtaatataaaggataaatgcttgagaagatggataccccattctccacgatgt[141 bp omitted]agaaaccctgtctctactaaaaatacaaaattagccggggtggtggcacatgcctgtaatcccagctactcggtaggctgaggcaggagaatcgcttgaactcgggaggcagaggtttctgcgggccgaaatcgcgccattgcactctagcctgggcaaaaagagtgaaactccatctcaaaaaaaaaaaaaaaaaaaagaacaaaacgtttcatataccccataaatatacacacctactaaatacctacaaaaaattttttagaataattttttaaaatattaaatggaaaaaatcatcatcatcatcccactgtgagactgacaggaggcactgagggtcataagcagggaagaggctggatccatgccacacgcattttgggtggcacggtccagccacaccttgtgggagggtttgtttttttttttttttttttgagatggagtcttgctctatcaccaggcaggagtgcaatggtgcgatgtcagctcactgcaacctccgcctcccaggttcaagcgattctcctgcctcagcctcccgagtagctgggactacaggcatgggccaccacgctctgctaacttttatatttttagtagagaaggggttttgccatgttggccaggctagtctcagactcctacctcaggtgatccacccacctcggcctcccagagtgctgggattacaggcgtgaggcaccctgccgggcccattgcacattctttttagccacacagtgccagaagccttttctatgttcggggattccccactgtaagccctcctcctttggagaagccaaagatgccagaaactcaatttcccagaatcccttgcagcaatggtccaggccagtgacctgggctgagccaatcaaacgctccagcaggaccttgtgccgtgagctccctctgctttgagtcttaaagaaacagttggccttggggagctttacaaccctcatcacgtatcttcatcccaccccccagagcccgactgtcaatccgacctctgcccctccactgcccactctagctcaagaccgcctccactgtccctcctgacccaacttcctccctggactcctgtcccagtctttgccattcccacctaaaccctacctgctgacctcccctcctcagagcttgccatggctccccagtgccctcaaggtaaatgagtatttgttgactaaataaataatagtaactgtatctggcagatgtaggcgagagtaaccactacccagcttaaatagaaaggactctgctattggctgggcgcagtggctcacgcctgtaatcccagcactttgagaggccgaggcgggcggatcacgaggttaggagatcgagactatcctggctaacacggtgaaaccctgtctctactacaaaaatatacaaaaaaaaaaaaattagccgtgcgtggtggcaggcgcatgtcgtcccagctactccggggcctgaggcaggagaatggtgtgaacccgggaggcggagttgcagtgagccgagatcgcaccactgcacttcagcctgggcgacagagcgagactccatctcaaaaaaaaaaaaaaaaaaaaggactgtactatcatgtattaggcactgacaaaatcgttggaagggctgaaggaacactgctcgggccccagaactactttcctactttccctctggaaaatctagtctttagctttccagcctcttcattgacaggagaatgtgctcgaaggaggttaacatggacattaaacagccactccacaaagaagcttttgtttgtttgtttgtttgtttagacatgggttcttgatggggtctcgctatgttgctcaggctggagcacagtagttattcacaggcacaatcagagtgcactgcagcctccaattccaagcctcaagcaatcctcccgcttcagcctcccgagtagctgggactacaggcgcgcaccaccactccaggccctgacagttaacttttattgaatacacctgtatgtcaagtactgtgctaagtgctttacatatgttgacttatttaacgtccccaacaataaggctcagagaggttaagtgacttgcccaaagtcacacagctggaagggggcagaactgggaatcaaacaggtacaaggctgccaagaatggattcaggctttggtggaaataacttccaggcttctccccgacgtcagactgtattgtcagcctctttctaggtcatcaggctctagtgtacccacttccccaacccatctcccatcaccccagccatctgacttcagggtccaaggactttaatgggtattcactagtttaattttccaacagtcctatgaagtgagtactgccaatttttttttaatttacttttcttctgggagtctagaaggtactgccgtttttacaaatcaggaaagtaaggctggcccagagaggttgcaacacttatcgaaagtcacacagcagggaagtagcagaacaagactggactaggctgtcagtcctggagcttgtcttcctaatctcttcctgatccccacttcttcatgtcgaacccccttttcacagaggacgaacgctggggccgaaaagggcaagggagttacctaaggtcacagccagtataactggaattacagtctacactcttctccctccattcccaaggcagccctgccctcaaaccctgtcttactcttaagcatctcatctgtctctgtccctaccctcaggaagaggctgccacctccaggagagactctgggagggcagcactccacccccatggcccaccaccctgtaatgccctcccccatgcactcctcaaatccctttcccaaaccgggccatttacgatgccatttgattcatagaagacaagttgtaaatcaaggccagacccagggctggggagttgagaccctgcccattcctcctttctcttcctggagagccaggccagcctgcagccccataatcagctgaccagggtctggtccatagggtagtgggtggtgaataaaataacgtctttcatggctcccaacttgtcctgccccagtctctccaaatcaatcaatctttttttttttctttgagagggagtctcgctctgtcacccaggctggagtgcactgattcgatctcggctcactgcaacctctgctttccgggttcaagccgttatcctgcctcagcctcctgagtggctgggattccagctgccatccaccagccttggctaatttttgtatttttagtagagacagggtttcaccatgttggccaggctggtttccaactcctgacctcaaatgatctgccctccttggcatcccaaagtgctaggattacaggcaggagccactgcgcctggcctaatttttgtatttttaatagagatggggtttcaccatgttggccaggctagtcttcaactcctgacctcaagtgatccgcccgtctcagcctcccaaagtgctgggattacaggcatgagccactgcacccagccccagatcaatcaattttatcaaattagctatacatttccctctaggtgctgctttaggtttatcccaggttgttttttgttttgttttgtttttttcttgatgttgtttgtttgtttagagacaggatctcactgtctcccaggctggaatgcagtggtatgatcttggctcattgcagcctccatctcctgagctcagcgatcctcccacctcagcctcctcagtagctgggatcacagatgtgtgccaccatgcccagctaatttttgtatcttttgtaaagacacagtcttgctatgttgcccagcctggtcttgaactcctgacctcaagcaatcctcctgcctcagcctcacaaagtgctgggattgcaggtgtaagccaccatacctggcgtgttttttttttttttttttg[132 bp omitted]caccacatccagctaaattttttgtgtgtttttcgtagagacagcgtttcactgtgttagcctggatggtcttgatctcctgacctcgtgatccacctgcctcagcctcgcaaagtgcttggattacaggcgtgagccaccggcccggcccatacctggcctgtttttatattctattatcatttcaaatgtatttttattggaactgttatatttggagtgtatggatgttcacacttattcatattttattttctcaaatttactcttttttttttttttttttttttgagatcgagtttcgctcttgttgcccaggctggagtgcaatggcggatctcggctcaccgcaacctctgcctcccaggttcaagcgattctcctgcctcagcctcccgagtagctgggattataggcatgtgccaccatgcctggctaatttttgtattattagtagagacaggatttcaccacgttggccaggctggtctcaaactcctgacttcttgatcctcctgcctcggcctcccaaagtactgggattacaggcgtgagccactgcgcccggccaaatttactgtttttattgaggcataatttattttctttccttccttccttccttccttccttccttccttccttccttcctccctctcttcctctcttcctccctccctccttttttttttttgagacggagtctcaccctgtcacccaggctggagtgcaatggcgtgatctcggctcactgcaacctctgcctcccgggttcaagcgattctcctgcttcagccttcagagtagctgggactacaggtgcgcgccaccacacctggctcattttttgtatctttagtagaaacggggtttcaccatgttggccaggctggtcgaactcctgacctcgtgatctgcccacccaggcctcccaaagtgctgggattacaggtgtgagccaccatgcccggcctattgaggcataatttctatttggtgaagtgccctaatcttaaaatcaatgaacttttatattcgtgtacatgtgaataagcatcaccaggatctaaacagagactactaccagctcccaaagaaactctctcatgtcccctcccagtgaatgtctctctctcctccaagaaaatgttctcgctgagcgcagtgggaggcct[135 bp omitted]gaggcaggagaatctcttgaacccgggagatagaggttgcagtgagccgatatagtgccactgtactccagtctgggcaacaacagtgaaattccatctcaaagaaaagaagaaggccgggccaccctctgcctcctgggttcaagcgattctcctgcctc[134 bp omitted]gcctgaaaagtgctgggattataggcaggagtgaccgcgcccggcccatttgtctaatttcttttgctcaactttttttctcttcggattcctttttttctttctttttttctttttgtacagatggggtgggtcttgctatgttgcccaggctggtcttgaactctcagcctcaagtgagcctgcagcctccaattccagggctccaggcttagcctcccaaagcgctggtgtggcagagaatagggaattagggtaactgggggttcatcaggtacagccagtttgcataagcaacagaatagcaggtgcagtcagttcatggaggcaggagagccacaggtgcatacaggctctattctccctcccatgataataagccactccagcctctgattgactgcgagccaggtctccacttgggctctgattggtcatgagccaacccttcatagagtgtaaccaattggaggcctctgaagggcacctaggggtgttgccgggtcctttttagcttaataaaaaccctaactggcaggcctggcgcggtggttcgcctgtaatcccagcactttgggaggtcaaggcggccaaatcactcaagatcaggaatttcggaccagcctggccaacatggtgaaatcccgtctctactaaaagtacaataattagccgggtgtggtggcgcatccgtggtggctcgtgctaggagtcccagctactcaggaggctgaggtaggagaatcgcttgaacgcgggaggtagaggttgcagtgagctgagatcatgtcactgcactccagcctggtcaacagagcgagactacgtctcaaaaaaaaaacaaagacaaccctaattggggaggtgctccagcccgctcccactctgtgaattgtcttggataaatctctgctttgtcttctgttgcttcgttctttttttcctttttctttttattgaaacagactaccccaaaatgcaataactttttgtttgtttgtttgcttttgagacggagtctcgctctgtcacccaggctggagtgcagtggcgcaatctcggctcactgcaagctccgcctcgtgggttcacgccattctcctgcctc[224 bp omitted]cccaggctggagtgcagtggtgcgatcttggcgcactgcaatttccacctcccaggttcaagcgtttctctttcctcagcctccggagtagctgggttacaggtgtgtaccaccacacccagctaatttttttttcttgaaattttaaaatctctcaaaaacttatacaggtgaattttgatcgtcatgatgggcttattggtaggatttttggtaacaagcacgggcaccaggacctccaaactttttggactcagagcgacggggatcagctaccagcagggtctggtcatactggatgaggatgtctttgatctccttggaagactcatccgcatatttctggtactaggccaccagggctctggagatggactgacagcataaatctaggccccttcacatggacatggatgtccacaccagcaaatcgctccttgccgggaccgagaaagagaactggctccagcagcttgtatcgtagtgtgcgcagcttgatcatctccaggagccgcccattcaccttgatgaggccatcgccgtgtttgcagtgcaccacagctgtggctgttttcttgccaccgaagacctgcacagattgcagctggccctcggaccgcatggctgcgagcgtgaactagagaccctcaccacgtggtgctgcaatcagaaaaaaaaaaaagctaatttttttttttttttttttttgagagggagtttcgcccttgttgcccaggccggagtgcaatggcgtgatctcggcttactgcaacctccgcctccccggttcaagtgattctccagcctc[134 bp omitted]cggtctcccaaagtgccaggattacaggcgtgagccactgcgcctggccattttatttttatttttatttttttacattttatttttggttcatggttttttacattttattttggtacaattttattttggagacaggttcttacctcttgccccactctttttcacccaagctggaatacagtggtgccatcatagctcactgcaaccttgacctctggggatcccacctcaatctcccaagcagctgcaactacaggtgtgcgccaccacacttggctcattttaacttttttttttttttgtggagatggggatcttgctatattgcccaggctggtctcaaactcctggtctcaagcaatcctcctgccttggcctctcaaagtgctgggattacaggtgtgagccaccatgcctggtcaatagctctaaaatggatgtggggttggctgacagttggccaatccaggccgggctcagatgggaagttctgcttcatatgggaaccttgtggagtgcaggctgaggggagaggaagctctcaggggaagcccgtctcatggtgatgctgagatgcaaaaagaaatgttcaaggtctcttgaggcctaagctcagaactgacacgactgtcacttgtgcccctctgctattggccaaagcaagtcacatggccacaccaaaagttcaaggcccatcattttgtcgtcctccacaggtaaggattatatcaggtgtgcttttcttaaatgggtccacacactcgtacatccacacacgatcatattcatggaatatctctggaagtatattggaaacggtcatcaggtttgcttgcgggaagggtgtccggggatcagggagagagaacgcttactttcactctgtagtcttttattctctgtgtctatgaacgttttttctgactgcattccctttttttttttttttttttttttttgagatggagtctcactctttcgcccaggctggagggcagtggtgctatcttggctcactggaacctctgcctcccgggttcaagcaattctcctgcctcagcctcccgagtagctgggactactagcacgtgccaccatgcccggctaattttttgtgtgccttttttttttttttttttttttgagacggggtcttgctctgtcccccaggctggagtgcagtggcgcgatctcggctcactgcaatctctgccttctgggttcatgccattctcctgcctcagcctcccgagtagctggggctacaggcgccagccactgcacccagctaattttttgtattttt[145 bp omitted]tggccgggctggtctcaaactcctgacctcaagtgatccacctgccttggcctcccaaagtgctgggatgacaggcgtgagccaccactcctggccattattttttaaattaaaaaattatggccagaaggtgaaaatagaaaagctcccatcctatgtacccattttcctgacgtggcaaactaaggccttaagggatagggtggagtatttgttggatatgcaagcaatttctcctctctgagcctcagtttccttttttatttattttttgagacaggctgtcactctgtcacccaggctggagtgcagtggtatgataatagctcactgcaggctcagactcctgggctcaagcaatccccctgcttcagcctcctgagttgctgagaccacgtgtgacacatcacacatggctaattttttttttaattttttttggcaggtgggtgacgcctgtaattccagcactttgggaggccaaggcaggcagatcatttaaggtcaggagttggagaccagcctaaccaacatggtgaaaccctgtctatactaaaaatacacaaaaattagccgggggtggtggcgcatgtctgtagtcccagctactcaggaggctgcggcaggagaattgcttaaacccaggaggcggaggttgcagtgagctgatatcgtgccactgcattccagcctgggcgacagagcaagactccatctcaaaaaaataaacaggctgggcccggtggctcacgcccataatcccagcagtttggggggctgaggtgggcagatcacttgaggtcaggagtttgagaccagcctggccaacatggtgaaaccccatgtctactaaaaatacaaaaaaattagccaggtgtggttcctgtaatcctagctactcaggtggctgaggcaggagaattgctttagcccagggcacggaggttacagtgagccaagatcacgccactgcactccagcctgggcgacagagtaagactctatctcaaaaaaaataaataaataaatttttttttgtagagataggttcatcctatgttccccaagttggtctcaaactcctaggctccagcaatcctcctgaagccctgggattacaggtatgagtcaccacatccggccagtttcctcatttttaggtggggctggtaatagtgcctaccttggggggtcagctacaaagattctggggctctgctactccttggctgtgtgacctaagacaagttactcagcctctctgtgcctcatctttttcacctgtggaatggagcgaatcatcgcagctggtgtgaagattaacaatttgtatataggagttggcacagggccagtctggggtaagaactcaaacatcagccattgttggcgttgtgcaa[221 bp omitted]gaggcaggagaattgtatgaacctgggaggcggaagttgtagtgagccgagattgtgccactgcactccagccggggagaaagagcatgactccgtctcaaaaaaacaaaaacaacaacagcagcaacaaaagcaagaaaggttttccttagttaacactttcttcttctttcaatctttatctcatttaagtctcacctcaatgctgtgtgatgagtgtgatcatccccattttactagacgaggagacagaggctcagccagagatcattgttcccccggtttacatggaacagaaatggcagggccaggatttaaacctagatctgcctggctccccgcccggctccatcccctgccctcccccaacacacatagtatttaccgggtgctaccctgttctaagccttttctgggggattatacagtaatcctcaccacagccttaaagtagggtaccctgtgagtctcgtttgacagactagaaatctgaggtccagagaggttacttcttggctcagagggtcacacagctagcaaatgacccagctgagatttgtccctgctggcctggctccagtccctgcactgcctgtggtaagcgtgtagcagatccagatccaatgtccagcgtcgtgaggccaaaaaaatggggggcagggggaaggctctgctgcccctcgatcctgtgctgttgaaatagctggagctagcactttggaaggccgaggcgggtagatcacctgaggtcaggagttcgagaccagcctggccaacatggcgaaaccctgtctatactaaaaatataaaaattacctgggcgtgatggtgcacacctgtaatcccagctactctggaggctgaggcaggagaatcatttgaacccgggagatggaggtttcagtgagccgagatcatgccattgcactccagcctgggcaacagagacactgtctttttttttttttttttaggggatggagttttgctcttgttgcccaggctggagtgcaatgacgccatcttggctcactgcaacctccgcctccctggttcaagtgattctcctgtcttagcctcctgacaagctggaattacaggcccatgccaccaagcccggctaatttttgtaattttagtagagacacggtttcatcatattggtcaggctggtctcgccctcctgatctcaggtgatccgccctcctgatctcaggtgatccgccctcctaggcctcccaaagtgctgggattataggcatgagccaccactcccagtgagatgctgtcttaattaaaaaaaggaagaaagaaagaaatagctggagcttggcacagtggctcatgcctgtaatcccaggactttgggaggccaaggcaggaggatcgcttgaggtcaggagttcaaaaccagcctgggcaatatagggagacccccatctttacaaaaaacaacaaaaagtagctgggtatggtggtgcatttgtagtcccagctacctgggacttgggaggctgaggagggagcattgcttaaacccgggaaatcaaggctgcagtgagttacgactgccactgcactccagcctgggtgacagagtgacacctgtcttttaaaaaagctagagtaggccgggcatggtggctgacgcctataatcccagcactctgggaggccgaagtgggtggatcacctgaggtcaagagttcaagaccagcctggccaacatgggaaactccatttctacaaaaatataaaaattagcaaggcatgatggtgggtgcctgtaatcccagctgcttgggaggctggggcgggagaatcgcttgaacctgggaagcggaggttacacaatgagccaagatcgtgccactgcactccagcctgggcaacagagcaagactgtcttaaaaaaaaaaaaatgctggagtagttaggatatgagtttgaatttttatttccatgattcaatcagcacctattctcccaaatgccttctctgcgttgggcctgtgctaggtggcactggggacacagtggagactgacatggcccctggccgcctcctcccttcttggggctcatagtctaatatgggactgacctgtctccccacactgatgacccagagttggcagggctggatgtgggagcccaagagcctggaaacctgggaaataagaaagggcttcctggaggaggaagcatcagcactggggctcagacaacagggaagtagagggcacgttggctgcaattcggagggagcgcggagctgtgccgagtctggagtttggtccacggaccagcagcgccctctgctggaagcatttcatagtgtagtgaccggggtaccgcgcgcattgagccatgtatgtatgtatgcatttatttatttttgagatggagtttcgctcttgttgcccaggcaggagtgtaatggtgtgatctcggctcactgcaacctctgcctctggggttcaagcgattcgcctgcctcagcctcccaagtagctgggattacaggcgtgcgctaccacacccggctaattttgtatttttagtagagatagggtttca[131 bp omitted]ctttggccagcttactattctaggacttgattccttcattcagtcacaatttattgagcaccgactttgcatcaagctcttgctgaagataacagtgctgacaatatacagccctgccctcagagcttatatagtagaggagaaaaagtgaacccataatatacagtcagtagcgagtatttactaagtactttctatttgcgaggccctgataaaagtactgtcctggccaggcgcggtggctcacgcctgtaattccagcactttgggaggtcgaggtgggcagatcacctaaggtcaggagttcgagatcagcctggctaacatggggaaaccccgtctctactaaaaatggaaaaattagctgggcatggtggcgggcgcctgtaatcccagctactcgggaggctgagacaggagaatgacttgaacccaggagttgcagtgagccaagataagatagcgccattgtactccagcctgggtaacacagcgagactgtgtctcaaaaaaaaaaaaaaaaaaaaaaaagtactgtccctgtattagttaacattcaattctcaaagccttagactatttatattttattgactagggaaactgaggcacagagaggttaagttacttgcccaaggcctgcacagcaagtaagtgccggaatcaaatttgaaccctgagcccaattcttagatatcacattcccttgccaataacataatatataacataacataatgatgtgatatatgttatataaaataactttaggggccgggggcggtggctcactcctgtaatcccagaactttgggaggccgaggcgggaggatcacttgaggtcaggagtttgagaccagcctggccgacatggcgaaaccccgtctctactagaaatataaaaagtagccgggcgtggtggcagacacttgtagtcgcagctactcgggagactgagatgggagaatcgcttgaacttgggaggtggaggttgcagtgagccgagatcgcgctactgcactccagcctgggtgacggagcgagactccctctcaataaataaataaggtaattttaggccctgaaaagttttgtgaacaaaatcaagaggagtatgtaatgttttggtggaagggtgccatttagaagggggcaatcagggaaggcctgccggaggaggtggcctttgagaagagacctaaagacgatgagatctgtgggaagagagatcgaagcaggccacacaaccaaggaaaaggctctggggcaggcactgcaagaaagccacctgtctgggatctaaagtttccaaagttttagcttggccaaggcccctgcgctacaatcaccctgattcgaggtgtcctggaggttaccagttccgcgtgcgaagttctgccattcccgcggggctggagccccgaggctgaacttcccacgggcggtgggcgtggccggctcacctgcgggggcgtggctcccggctgccccgcccctcggaggagccgcccgaggtcccagacgcccggcgcagcgggagcggcggggcgtgcctggcctgcgggacgcgactgatcgcagtggggcgaagcggggccggagccgcccgcggtcaggtgggtgccgggagtggggcgcgggactctcggagagccgcgatgatggggggcgggggcaaccctgggcccgctcgccctgagacggggaagggccttggggctcccggatgccccctgccccgtcctggggctctccgggatctggaggcctggctggggtcccatgccccccaccccagcgcaggtaaacagcgaggacggggcggggcctgggagggagagggagggggcccttgtgactgcgggtgagcctggtgcgcggggctgggcaggccagggtaagttggtgcggcttgcggggctgggccacgatgggagtctcctgcctgcctgtgtttgtgtgtgtgtgtgtgtgtgtgtgtgtggctttgcgtgtgtgtaagagagtgtgtcaggctgtgggtatgagggtgaaagcgactgtccgtgtaaccctgtgatgggactgtgtgtatgatgtgacacttttagcaatgtgaaaacgtgggcgacctctgactggaatggtgtgtgtgtagaattggattgctggtagcactttacgaccaagagctagtgcgactgtagtcgactttctgcttggcctgatgtgcatgtgtgtggctgtgtgtgtggctgtcttcatggcagagagtggaactggttgtaggattaggtgtgattgaccaagaggctgtgcggctgtggttgtctttctgcctgttggtgtgtgtgtgtgtgtgtgtgtgtgcgcgcgcgcgtgtggtggacagtgtggcactggatcagtgataggtgactatgattgacttttgattgtgtgtcactgtgatggtgcatggggctgggcggaactgtgtccagaagtggagctgtttcatgggacggtgcgcgtggaaccttggggttggatgagtgaggtgtggaggtgtgtgaagccgtgtgtgcgtgtgtgtgtgtgtgtgtgtgtgtgtagagaggaactagagggtgtgtgatctgcattgataccgtggctggcagtggtgtgcaacggagagtttgtgggagatgggagtggagacgtggacatttaagtgggatgctcctccaagcgggtgacaggatggaaaagggggtccgcgtcagggatcagtgtgtgggactgtgcctatgattatcagctgtgcggttgtgcacccggggctctgtgtgagtgtgggagctgctgtgtgtctgggacacagcccgagtgctggatggctgtggttgagccgtgtttgttgctgtggttgtcaatctggctgtggagtggtgtgtgtaaggctgtgtctgaggttatagagggaggttttacatcggcaaaattgtgtgaagaatggttgtggttgtcaggatgactcttgaacctgtgtggttgtgagttcaaccatttatgatgtttgtgtgtgaggtgtgagaataggtatggtgtgatatacacaagcacacagattggccgggtgcagtggctcatacctgtaatctcaacactttgggaggctgaggcggcggggattgcttgaacccaggaatcctagactagcctgggcaatatggtgataccccgtctctacaaaaacaaaaattagctg[134 bp omitted]gccaacatggtgaaaccccgtctgtactaaaaatacaaaaattagccaggtgtggtggcgggcacctgtaattccagctacttgggagggtgagggaggagaatcgcttgaacctggggaggtggagatcgcagtgagccaacatcatgccattgcactccagtctgggcaacagagcgagactcagtctcaaaaaaataaaattaaattttttaaaggttgatatatacatcacatatatacacatacatatatctagagagagggagagatcaatgacgatcaagtctgtggtgcacaaaacgtacaggacccttactgtatgtgatcgtgcatgtacaacatgtgcaaaaaccgctgggctgcttatggtggatgcagtggcttgagtgaagtgtgcgagaacgtggcatccctccacgcgtattcacagctctctgttccgacagtggagctgaatctgagtacttgtgtgtgcatggcgtgtaggtgtgggagtccctgctggccaggcctggagtgggagggagaggaagtagggaaactggcgagggatccatagtgaatcttgggagtgtgtgcatctggaggtgcgttgggcacattgtggggagttggctgcttgggagccatgtgagttcgggggacagcgagtgtcacggtcaagtgcaaggagatggtctgaatgtgagtgatttggggagtgggagagacagagttagtttctgcgtgggttggcttttctttcttttttttaaataatattatcactttttgacacggagttttgctcttgtcacccaggctggagtgtggtggcgtgatcttggctcactgcaacctccgcctctcaggttcaagcaattctcatgcctcagcctcatgagtagctggggactacaggcgcataccaccatgcctggctaattttgtatttttagtagagccggggtttca[144 bp omitted]gtatacagattgtttttgaaagaatagtatatgtgtgtgcctgagtcagtgtgttgtcttaggttgtatttctaaaaggaaaatgtaaatgtttttactgagttgtatatttaataggagaaagtgagtgcgtgttctaagaggagaatgtatattatgctgtcctttctttctttcttttttgactgggtcttactctttcacccaggctgagtgcagtggcactatcatggctcactgcagcttcaacctcctgggttcaagcaatccttctacctcagcctccaggtacaccatcaccacacccagctaatttttttatttttatttttgtagggatggggtctcactatgtttcccaggctggtcttgaactcctgggctcaagtgatcctcctgcctcagccaaaatcccaaagtgctcggagtacaggtgtgagccaccgcacccggcctacattgtgtttctaatgagggagtgtgtgtgtgtgtgtgtgtgtgtaactgtatttctgggagggtgtgtgtgtgtaccgtcttttttttttttttttttaaatgaagtctcactctgttgcccaggctggattgcagtggtgcgaccttggctcactgcaacctccgcctcccgggttcaagcaattctcctgcctcagcctcccaagtagctgggactacaggcatgcgccaccatgctctgctatttttttttttttttttccagtagagacagggtttcaccctgttggccaggctggtcttgaactcttggcctcaagtgatttacccaccttggcctcccaaagtgctggcattacaggcgtgagccactacacctggccccatgttgtattggagagaagggagagtgcgtgtgtgtgtcaaattgtatttcggagaggaaaatgtgtatgttgcattgtgtctttaagaagggagggtgcgggtgtgtgaggtgtttctgaggagtgtgtttgtgtgtatatgaggaccccagaggcaccaccagctaagtttctgtgaccttgtcacccacatacaaccacatgaagtcccatagaggggggcccccacccactatgagctgggcttcagactctcagctgtcacatggccagtgtgacatacctggaccacacctatcacacgtgtgtcccgacaggccctgggctggctaagcttgtccgatggaggagggcggagcccctgttcccccagggtccatctgttgcctgggagccaacacatggccccatcctcattccccccaacctagaggcctcctgggcttctgggggccctggcccctcggccctctcctcccaccccacccacccccagtggtctgactggttcccgacaaaaacaccctaagaatgagctcacgcagaggctgccgcctccacacgccccgcctcactctgccggcagaggagggtgcctctggtcccaggtcacacggccaaccgggagctctgggccaggggatccaagggccttggggtggggaaggctggccaggtgagctgagggcagatgggggaccccaggctagctgtttgctttctcttggttaattacacataggatttgggaactgtcctcagggcagaaccctgggttgggaggacagacgaaggtagacaagactgttccagatgagagctggctgggatgggtgtggagactgggatggagagggtgtggaggcagagggctggccaggatgggtggagcagggaagagccaggatggggagaagttaggggtcctgatggccattatgggaatagaggctgggggccaactgactggcccgggcaatgattccccaaacccctcaccattgctccccaggagcagcaatgtctgtgcaggtagcggctcctggaagtgcagggctgggcccagagcgcctgagccctgaggagctggtgcggcagacgcggcaagtggtccaggggctggaggcgctgcgggcagagcaccatggcctggctgggcacctggcggaggccctggcgggacagggcccggcagccggcttggagatgctggaggaaaagcagcaggtggtgagccactcgctggaggccatcgagctggggctgggcgaggcccaggtatgagggggccaggtggggagctgggggaaggtcagctgagggcggagggagggccaggcatgagggggacaggtatgtaggggactgggagagggttcactattgcagaggggcacactttgggaggctgaggtgggcagatcacttgaggtcaggagttcaagaccagcctggccaacatgggaaaaccccatctctactaaaaatacaaaaagtagctgggcatgagggctcctgtaatcccggctactcaggaggctgaggcatgagaatcgcttgaacctgggaggcggaggttgcagtgagtggagatcgtgccattccactccagtctgggtgacagagagagactgtcccaaaaaacaacagaaaaaagtatggcagagaggcacatccggggcagggggaggcctaggggaaccaggcctgggaaggggaggctccaggtcagagatggagtcccttggcagctttagggggtccttgtgtgtgacagggacccctgaaccagatggcattcttcagtaaactgtgggtcctagggcaagtttgggggtaaaatcagaggggcccctgggagcctctgagggcactggggccatgttggcagagtctctgcagaatctgggggtgtcgtgcatagtagtggggtgctacggcctgactcgaggcctgggctgggtcaggggccgtctggcagggcaggaaccaacctcgacttgggacccccaccccgggcaggtgctgctggccctgtcggcacatgtgggtgcactggaggcagagaagcagcggctgcgctcgcaggcccggcggctggcccaggagaacgtgtggctgcgggaggaactggaggagacgcagcggcggcttcgggccagcgaggagtccgtggcccagctggaggaggagaagcgccacctggagttcctggggcagctgcgacagtacgacccaccggcggagagccaggtgccacgggcagggcgaggcggggggtgctgggcccttcatagagccccacagtcccccagaccctccttagaatcccacagtccccaagatcctccttagaatcccacagtcccccagaccctccttagaatgccacagtcccccaaccctccacagagcccccagacccaccagaacttccacagacgcccccactagctactccacgaagcccccgagcctcgccagacccccagggggcctctgacgctcgtgaccaccacctccctcaaaccttgagataggctgggtgcggtggctcacgcctgtaatcccaacactttgggaggccgaggcgagcagatcacctgaggtccggatttcaagaccagcatgaccaacatggagaaaccccgtctctactaaaaatacaaaattagccgggtgtggtggcacatgcctgtaatcccagctactccggaagctgaggcaggagaatggcttgaacccaggaggtggaggttgctgtgagccaagatcgcaccattgcactccagcctgtgcaacaagcgaaactccgtctcaaaaaaaaaaaaaaaacaaaaaaacaaaaacctgagatagagccagggccccggtctctgaaacaagcccccaccaccccggccccccactttcctgtctctgcagcagtctgagtccccgcctcgccgagacagcctggcctccctgttccccagcgaggaggaggagaggaaaggtgggtgttgggagtacatgccacagaggatggcaggccagggtggggagggggctctgagctgcaggaccccaaaatctctgagccaggggatggggaggtgagggcagggtgaggaggaccctgaatgtgacagtgcaggtgaggctgggagccacaaagacagggtagccgctatgagcctggcaggccccgtattcacatcccacagggcaggtgggctgccgtgttcctgtcccgaggccaggatgcatcccaccagctggttagatgctagtgactcctatctcagaagttagcgtgggggcccatagtcccaggggccagttaggcagtccggcagttctgaggcacgtgtcccctcatgcgaggctggaggggcaggaggcttgcagtgacccagagcccaccccaccccacctaggtcctgaggccgcaggagcagcagctgctcagcagggtggctatgagatccctgcccgccttcggaccctgcataacctcgtgatccagtacgcggggcagggccgctatgaggtggcggtgcctctgtgccgccaggccttggaggacctggagcgcagctcgggccactgccaccctgacgtggccaccatgctcaacatcctggcgctggtgtaccggtgagcactgcggccagccatggctgggggcaggaacggcagggacccattgggtgcaagtggaaggatcctggtgccccctctgtcaccatggagcacctagggaggtcaggggaggggacagcaagaatgggaaaggaagggaaggctcctgctgtgagaacggcaaagagggagtgggacagggatctgggggggccactgagccaggcagagaggagtcagagagcacggacaccagggaccccaacagagcaggcaggagacctggggtggctagaagcttggcagaggtctgggggtacagggcccagtgttagagaattgcgaaatatggaggggcccacaaaaggccctcaaagggtgtgccacccatgcttggttcagccaggttccctgggcctgtcaggattggcccagcccctgtggctgcagctgccccaacccttggctaaccccctccattcctggggcgccccccacagggaccagaacaagtacaaagaagccacagaccttctccatgatgccctgcagatccgggagcagacgctgggccctgagcaccccgcggtgagtggggccccagggagacgaagtggggtcaaagtggggccacacctgcccatccctgacctgtgcctcccccaaccccgcaggtggccgccacgctcaacaacttggctgtcctctatgggaagcgtgggcgttaccgggaggcagagcccctgtgccagcgcgctttggagatccgagagaaggtcccatccccctcaccccaccccgaggaaccccttgtcccatgtagccctccccagggatgctgagcacgtacatcgtgaccctgaccctcgggccccttgcgtttggtattgggagaccccagttggagcctagatcacccaacccatcacccttgaccttctgagatcccagtttggtcttgaccctgactgacctctcgccttacctcacacatcaccctccaactgggtccccccatagcctttccaacccctcatggccaccagcacaagcccaaccctgacctacccatctcaccctgtgccccacgtttctggaccaccatgacctctgaccttggtaatcccgttagatggtataacttgtgtccccagcccccaacctctcaggtcactctctgctttgaccctgtaatccccaactcatgaccaccatacagcagtgatgtcacgtgtcccaccaatcctgtatgatccctctgacttgtgacccctggcccccaggtcctgggtgctgaccacccagatgtggccaagcagctcaacaacctggccctgctgtgccagaaccagggcaagtttgaggacgtggagcggcactatgcccgggccctgagcatctatgaggcactgggcgggccccatgaccccaacgtggccaagaccaagaacaacctggtgaggcccctggggctcagagtgggccaagagtggagggtcctgccctggggaggcacccattggttggatacagggtgagcaacgtgagggtgggggggggccccccaggccgggcccttggagcaagtgtcagacacaggagctggctcagcacagaacacggaatcaggaaacgcgtaagtccacggcagccagaggacagccagtgaagcggaagctggcaggcacaggtggcagcagcagacatttattgagctcactgtggccggctcccctcttagcccggtccccacatcgctagttcttatagcgtccctatgaggtgggagctgtcgctccactttgcgtgtgggaagactgaggcaccgaggccatgccaccagcccaaagtacagcagacaggctcagaaacaggaggctgcctgtcctccatccccagggcaggaagtaaggccgagctccaaacccactctgccccagggcaaggctttaggcaggggaaggatacggccaggtcagcacattagaaagtggggccagacgtggtggttcacgcttgtaaccccaacactttgggaggccaaggcaggaggatcacttgaggctaggagttcaagaccagcctgggcaacataccaagacccctgtctctacaaaaaaaaaaaaaaaggcgggactggatgcagtgttgggaactggggtccgaaaagttcccagacactcccttctccgcaggcctcagcctacctgaaacagaacaagtatcaacaagcggaagagctgtacaaagaaatcctccacaaggaggacctacccgcccctctcggtgagcccctagcccctgtctgtcttccctcctggtggcttctctatgtccccatctcagtgtcccccatctttccccctaggtgcccccaacacaggcacagctggtgacgcagaacaggtgaggatgggctgtgcttcggctcctggggtgggcgtggggactgcatgggcctgggggactgagcagcatccccggcccctccccaggcccttcgccgcagcagctcactctccaagatccgtgagtctatcaggcgaggaagtgagaagctggtctcccggctccgaggcgaggcggcggcaggagcagccgggtgagtgttgatcaggtcggcaaagagccctgacatcagcagaatccacagcccaccccacccccacccccatcttgctcaagaaccttccatggctcccatctcccctgtgatacacacagatcaaaccctgtgctggaaaggtccctcgtggaggggggccactcctggattcactcatttcctccctgctgccctctttgcagaatgaagagagccatgtcactcaacacactgaacgtggatgctccaagggctcctgggactcaggtgagggggacatctgggtcaaaaatagaggaggccatgtgggtaggtgcagagatgaggcaaaggcagggcggtcgggccagtggtggagtcagcaggtggtgggttggtgtcagaagagacccaggacaggagcaaagatgggttttacttggggtagaggcgagggggttggatagttggctgccaggctggacctggagctggagggtggatgtaacacttgcccctcacctcccctccaaccatcccctgtgcctgtctccagtttcccagctggcacctggacaaggcccctcggaccctcagcgccagcacccaggacctgagcccccactaacgtccagtgaactgcgctggccgcagcttcttgggaacagtgcaggagggatgggctggtggggtgagagggggtctatcatctcctggcccccccttgcctctgggtacctggtggatagctgccttctcctgcgattaaaggctgtggacgtgacagtgagaaatgtcacctgacttcataagaccttctagcaccaccgccgctgggaaccagggccaggcaagactcaggagtcaccaggaaccgtttatggccccacccgccccactcagagctgctgagcaatctgctctatcctcttcagcgtctcctctgattctagctgctccaggctgagcagggacaggcccagctgatcctcctgcagagaacagaggaaagggagaggggggcactgttgggcaggggcccaggcagctgctgcacttccccaaccacccccccgaatggccagtagggacaggatgtttgaatgaatttggagatgtccgtataatccagagcgggccatccctgtcaacataagatggggctgagggaggagccagctagggagtcggagaaggaccggctttctccaggccagcaccgtctctcctgaaaacgcccaatgcctcctcaccccaacttctctcaccctgccgtgcctgggccacctgctggcatctgtggcccctcgaatctcccccttccccccagagcctggcacgtagatgcacgataaacttctctttgctgagggcaggaggacaggcaggctgagggtggggagtggggagaatccaaggggactttctggaggagaagctcagcctgggagggtgccgggagggggacgcaggcctcacccggtggaagggctgtgccatctgccgcaggaagtacttggccacctggacaccctcgtccacggtcaggttgaggttggcatctgtgaggtgctcctggatccagcggggcagcttcccccgcttgtccccacgggcaaaccgctgtgggcagaagcgcaggccagggacagaaggtcattcggggagcctgggccactctccaccctgcaacccaccccacctgggaaatgaacgggaaacagcctggttcttggagcctgggatgggagcacaggggcacccctgaagctgcaccttgtcggcaaagaccatgaggccgtagtccgtcttgcccctgatggcccgacccacacactgggccgcgtggcgcatggcatcgaaggtaagaaagtcattctcacgaatctggaactggtcccgcaggtattccagccgcgcctgcagatacggaggatgagaagctggggaggtgggggagccactcctcccttgatcctaacactgtgggactccctgggagacagagctactcaccttgagaatgcggctctgtgtgtagacgtaggggacgccaaacatgatgacggcccgcccgtagtggtgcactggtgggcagaggagagggggcgaggggggttacaagtgtggctggtgggacagggacagcctcacgcgacccaggatgctgtgtctgagttggggggagagggtgtgttcccgccgggtgcctagggacagaggggaggggagggcccctctgtgcacctaggctgggggtgggtggttccccgcgggagcagacagcagagcgggcaggtgttccagagagctctgggaagacacctggggaggaagagcccagtccactcaccaaagtcgattccctcggacactttgccccgggccactgacagcaggatggccccgcggccattctcgcaggcctgaggtggggagaccgagacgcaagttaggtcactcctcagagccacctccccgacccctctccacgctggcctcgcacacccacctcctggtacttctccagggcgacactggtttcggcaccatcctgggtctcaataaagagcagcttgttcctctggatgttctcaaggatcccctggggaaggacccagggaggtcagggtgggttcagggcacagccatcctggttacatccaactcttctggggactcccacatcaccatgtctctgggcctcagctggctcatctgagatgtggtgagggagggtggaattgtccaacctcagttctttggggaaacagtgatctgggtggggaaccaatcattgctggataagtggggcaggcatgtggcccaagcgggtggccaatcagggcaccccaacccctgccagcgattggtggaggggctgactgtgaggcaggcagagccaatcagaggctgccctgagacttcccatatgacactacaatagagacagtgtggagccaatgcaaggacagaccactgggacagaatggagagtccagaaacacacagccacctgtgcagttcagtggggagagcttttactggagcaagtggattttcaaatggaaccaaaaaatgaaccttgaccccctacttcacaccacatagaaagatgaatttgaggtacctcatagacctggatgtgaaagctaaaaccacaagctcctagaaggaaacaaaggagcctctctctatgaccttggggtaggcaaaggtgtcttaagtaggacacaaaaggcacctgcgctgtggggactgggtcacctttcccgccgcgtggaagccgcctattgaagcacaaggccgatgtcctggctgtgaggatgacgttcccgcctcccatgcgtgcctttccaatacctggattagccaagttcactcacctcaccccaaagtgctttcacccactcctgagagcccggccatggtgtgctcagaggcacaaagtgcagagtggcctcccctcccacccatgtcctgctggtcacccagggcctggctgtggtgagccctgtttccagaatgccccacgacctcctctagctgcttccctgaaggggctcctgcagacccttgagaggctcgccccgagtcttggtccagccttaattctctagaattcctctaacccagctagagccacgcctgctatctgggcctccccaccaggccatctgtgctggaggataacagggatgggtaaccccaaaagcagcagagaagcaaggaacctagaacgtgggggtgactctgccacagggtactcctctgagggaggggcccacattggggcttatatctgcattctcagcctgatgtactgggggcggggcatgggggtgtgtgctgcttacaccccattcctacatgctgcacacactctcctgtcacacaggaaacctgtcaccatcagagtgtgagaggaatgaagctgacatagcggtgcagtgccagggactgaggagagcaggtgcagggagggggtggccaggcgtacctgctcataccaggaggccacggtgctctccatgtactggtagctggtgaagaaggccacgatgccatcagggaccacagcggacatctccagcaggaggttcccatagttccggatcacagctgcaaggggtcagaggttgggccctctcctggcccaggtcctcctcccttctctgtcttagaactaggagtttctggaaaccccactgaggctgcctgtcaggcttttcacacatatccccctcctcctcctcccgggcgtgtctgaggacccgccttgccacttcctgaagtcacacctggc[152 bp omitted]ctctactaaaaatacaaaaattagcccagcgtggcggcagaggcctgtaatcccagctactcgggaggctgaggcatgagaatcgcttgaacccgcaaggcagagactgcagtgagccgagatcatgccactgcactccagcctaggcaacagagcaagactctgtctcaaaaaaaggccatgtgtcacttccaggggagcacccttaggaaccagtgcacaatacactgtgaccactgtgatcccacctgtcacattatgctgcctctgacacacccagcggtggaggttcccaggtgaggagacacagggcaggcccctaccagctcacagtggacgtgtaccacgggcaagaaggaaactctgggctgagcaactaaggccagggatatttgttacagcagcatgactcagcccacctgactgatacacctcccctcttggaacccacagaaaccagccccactggcagcataccaatatcctcccgggtctcaaatttggagctgatggccacctggtcattgccacggccgatgatctggagagcaacagaggtcacgataagcgaggcagcagcaactgctccagcgtgagtgctgaccacctgctggtgctgttctaagctttttttttttttttttttaaagagagacagggtgtcaccatgttgcccaggctgatcttgaacacctggcctcaagtgaccatcccgccttggcctcccagagtgctgggattacaagcatgagccaccacacccagtctgctctaaactttttataaacacagtgtcattgaatgaaccctcagcaaccctgttatctgcattgcacaaatgacctgggctcagagaaggtgagttgcctgcccaaggtcacacagcaaacaggtggcaaagatggaaccggacccgagtctgtccacactctccaacagcagctacactctagccagccccaggccctgggccagccggatcccgaagaacacccctcgccatgccggcgggcatcccaccagccggcaacctcacacaaccaccatgcagtgggggtcattaccggtccacaacctctgacaggcaactccaaaagccaaaagctctgaacacatttctttttcaagtttggcacaaactcatgaagcagcaaaacctgccctgccccgagtctctccagaggcctgacttactccttagtgtgatgcttcccaatcttttactgccgaaatgggagtttgactcgggggagctgcccagaccccactgtgggcatcacacaccacacagcataggccttgtctctaaaggctggaaaattctgaattccaaaacaaatggctgcgcgcagtggcttacacctgtaatcccagcacttcgggaggaccaggcgggcggatcacttgaggtcaggagtttcagaccagcctggccaacgtggtgaaaccccgtctctactaaaattacaaaaattagctgggcatcgtggcacatgcctgtaccagctactcaggaggctgaagcatcagaatcacctgaatccaggaggcggaggttgcagtgagctgagatccgtgccactgcactccagcctgggcaacagagcaagactccgtcgcacaacaaaaacaaaaaaccacatccagcctggggacttcagataagggactgagggctcatgttgacatgcacgtgttacagagacggagacggagaggaaggctcacttacctgggtcacagccagaccacgtactcggcaagatgctaagatgctgactaagcgcctacctgtgccaggccctgggcgacctaagtggtttaccccagttctctctctcaatcctctcaaccaccctgggagatcagggaggatacattcccatttcacagatgagaaaactgaggcttgagagtcgagcccacagagaagcagaatcaagcctaagtctgtctgaatcccgaacccagcctcttcgctgtaaagctctcctgcctgagcagtgggggaagccaaggaaggagggcggccccttgcccccatctcccctcccggccccagccctagcctctcccactcaccatagggcagaggcagacccgtgccagcgtcatggtgaaggttgccatggtgacggggtggaagtccaggatcttggggtagatgtccagcggggacagtgtctgtggcgggacagtgggagggatctcagcaggactgggcagggaccaggaggcccatggagggaggtcagggactaggaggggacggggaagggtccttaccccagatgtgatgatgacagactggaaacgctcaaatacgggtttgatggccagcgaggcgtccatgcagctggagagagatgagggcagtgagggcccggggggctgggcccccgacccacagagcattcacaccctcaccgggcagggtcccacctgaagtgcaggatggggttggcaatggtcggggttctgtcgtcaaagggctcgatgatgatggtgaagcctgcagagggcaggcaaggaggggtgagattaccccactacagccacagctgcacccactcagtcattccctctcctgctccctcgcttcaccccaatctccaccccgtactgcctgggagtaaatgcgaccaaacatgactgcttaagccccaaaccaggcatctgagtccaaaatacaccccaacctgtccgcttcgggcccacacctgtgcaaactttcacgaaggatcccaagtagagagcccacagccccgcccactgctcactctcccagcaccgcatgggctgcccagcacccacgccaaagccaggagccagagcctcaagctttctcccatgaccttttcttgtttttgttttttgagatggagcctcgcgctgtcgcccaggctagagtgcagtggcatgatctcggctcactgcaagctcagcctcctgggttcaagtgattgattctcctgcctcagcctcttgagtagctgggattatagggacacccccctacaacacacccagctaatttctacatttttagtagagatgggggacctgcagtggtccacccgcctcaggctcccaaagtgccaggattacaagtatgagccactgcacctggcctcccacgacctttctacctaagccatcagcaaagccgggcagctctgcctccaaaacctacctgcaattcgcccactgcccccgaccccacgcggggccagccaccatcacctcctgcctggacccatcatcccctgctcgcttcacggcagccagagggaccctagggaaacctgagtccctgagtccagccatgtcacctccccgccccaagaagcctcccatggcccccacatgcctccagtggcctggtgcctgaccttcaaaaatcagcaggctcagtccccccagggcctttatacttgctggtcccatgtggcctggaaaacctcccaaggctgctccatttggtcatctgagactgctcaaaagtcagcccctccgagaggccctccccagccaccttttctacgcagacatattccaacacaacaatgtattttttttcatgataactgtcactttctggaattatttccttgtttatttggctgcatctttgctactggttttcccatctggaatataagttctggggggttagggatgagatcttttttggttcctgctgcttccacagtgctgagcctggcctgtttgttgaagaaataaatgaatgaatgaatttacatattcggtttcacacagtgaaaaaaaatcaagtcctctgtgctggggacacagtggtgaccaagccagccttgcccctgctcgcatgggttcgcagtccagtaggagacagacttgtcctcagatagtgatgactgagagtgggcagtgctgggacagaggtgcccagaggaggggcctgactcagcctgggggtcagggagggcttcctggaggacaagacatctctactaagctgagaacctaaggatgagggggaggtggttgggggatgaggaagatgaggaaggatgatccaggtgaaagaccatgaggtgttggcagatgggaaatagtgggtagagaatgacaaaggtagggatggaagatggggcaggacagagagacagaggcagaagcagcagccagccggcctcgctacccagccccagggcaagggcccagatctccatcctcctgtcaggccctgccgcaggacatgaggcccgatctggtttcctgggtacaggagaaacccccaggaggcagactgagcccctggtcagcttcacgctgaggatggggagggaacaccggcccataaagcctccagaatgatgtccctctctcgtaacctgaaaatctgaacatcagcctctactcctcttgtccctggtcccaaaacccaggcaccacgctccccatatcccagcctctctacctcccacatctctctccaaaccatacctttctctctccccatggccacatcctggccaaggcccctcccctcctgctcaggtccctgcctgccacccagtctcctgcctctagtccctgccagaagaactctttttttttttttgagacagactctcattttcacccaggctggagtgcagctggtgtgatctcggctcactgcaacctccgcctcccgggttcaagcaattctcctgtctc[134 bp omitted]cagcctcccaaagtgctgggattacagacatgag[132 bp omitted]tgcctcagcctcctgagcagctgggactacaggcgcccgccaccacgcccagctaactttttttgtatttttagtagagacggagtttcaccatgttagccaggatggtcttgatctcctgacctcgagatccgcccgcctcggcctcccaaagtactgggattacaggcgtaaaccaccacgcccggccttttttttttttttgagacgaagtcttgctctgttgcccaggctggagtgcagtgccacaatcttggctcactgtaacctctgcctcctgggctcaagcaattctcctgcctcagcctctcaagtagctgggattacaggagcccaccatcacacctggcaaattgttgtatttttagtagagacagggtttcaccatgttggtcaggctggtctcaaactcctgacctcaagtgatctgcccacctcggccccccaaactgctgggattatgggcgtgagccaccatgtctggccccagctaatttttgtatttttagtaaagatggggtttcgccatgttcaccaggccagtctcgaactcctgacctcaggtcatctgcctgcctaaccattccaaagtgctgggattacaggcatgagccactgc[143 bp omitted]aaccccacctctactaaaaatacaaaaattagctgggtatagtggcatgcgcctgtagtcccagatactcgggaggctgaggcaggagaattgcttgaacccaggaggcagaggctgcagtgagccaagatcacaccactgcactccagcctggcaacagagcaagactccgtctcaaaaaaaaaaaaaaaagcacaaatctgacctggcaccttgcttgctagaatctgccatggctccccagtgccctcaggagcacaaagatcaactcattaccgtgccctctagtgtgagctgaccccatagaatttctctggcctcctcccttaccactgcccatgccatccttctccactctgcagcccgaggaagtctgtgaaaatgtaaatctgagcacaaggcttactcaagaactatgtatggctccccactgccttcaaaatagggcccacacttccaagccaaaccccacaaagccctgtgtgtcctgccaacaaccctctagaccctgctgggaccctgattccagctgctaggaggcccagcagggacagaaaaaggtgagcttacctttggcgtaggtgctgacaagggtggcaaagttagcaaggagggtgagcggggagaagtcagcaaggtcggtgatctccagagtatgcagcagggaccggaggcgttcagcacagaatctggcggggaggagagacggggtcggggggcagacggaagcatgagcaggaccagcagccctgcctccgccatcacgacggtcacgtgcctgtctccccagccaatgagcactcagtgagggtgggcactgggcctgttttggaaacttgcacccccacgctgtacacctgcatgtcacaaatagccattgccgcataatggcacagacagagcaataatcagacactccagagtcatgtggtcacttgtcacacctgctagcacgacctcctaagtgggttctttttttctttttcttttttttctttgttcagatggagtcttgccctgtcatccaggctggagagcactggtaccatctcgactccgcctcctgggttcaaatgattctcctgcctcagcctcccaagtagctgggattacaggtgcctgccaccacactcagctaatttttgtacttttagtagagacggactttcactatgttggccaggctggtcttgaacttctgacctcgtgatccacctgcctcagcctcccaaagtgctgggatgacaggtgtgagccactgcacctggccctaagtgggttctgatcaaaacaagagacgcacaatcacacccagaaccccccagtcatggcattaatcccgcatggccacatggtcacgcattcacacccagagcctctcccactgcctctcacgcacctatggggacacacacggtgtcggaaccccatgggctcacagaggaatgcagtcaacacccacatcccacagagtcccacggataccacgtccacacactcacgcatgtgcagggccactcggccacaaccacacacaggcagggccgaggcagggtcatagagcagctggctttgaagccaggtgggcagtcacacttgcaaacctgcctcccgcacgtcagccctcccagcctggctcctctaaccccaggcgcctaccccggctggtcgctagctgaggatgagtctgtcccctccactgggccatggagcctctacggctgtgtccccagcatgaagcaggcacttggggaatgtgtgttgagtgactgagatcccctctttgccctcacaagtctccaatcctggggaagatgggcaaacccacatggaaggtggcctcacccacagaggcagggcagccagggcctttggagcccacaggcatggcttcaagccccaactaccgggcacagtgctgtgtggctctgggcaaaggcttcccctctgggagtcccagtgtcctcatttgcagggtggggatgctgtactgggggtgcaactgaggtaaggaacataaagggcttagctcctccttagtgctcagggcagggtaggtgattggcttcgctgctctctcattaacccaccaaagaaccctgtgaagtaaagacccgactccttggccattttacaaaggaggaaactgcagttcaaagaagacccatgacttacccaaaggaaaagccccctcgtatcccttggtcattctctgcctgccctgtgcctcaagagactgactcccccaaaatgcgcccagactactccatggggacgcccctgccctcaggtttggaagattagaggcatcggtgggaagatacatgggccggggacacctcctccagctcccagcctgcgaggccctggtactggtttctgctcccagcagaagcccctgtccaggcccccaccagttggttctcaacacactccctccctgccgctgtggcctggcttagctcccagctctcacctcccaccctccttggctcctcccccagcccgcccctctgtaaatggtgctcccactctctcttgggtgggggagattctccaatccagccaggtgttgcctgccaggcccctgcccgacgcacggacccaggatcagctccaaccttgctcccggacctcccaggtcagaccagacaaggtcccacgtgcctcgcccagctcactcactcctgatgctgcagtggtgacctggggctacaggcgtggaggacacggctctgcataaccgggacctgccgggcccccaccccgcgcgctgtctggggccgcacctgaggggcttgcgctggatgcacacgcgctgggccaggccgctcaggaaggcgggcgggctctcctgcaccacatgctgcacacgcagccgccacttcacgtactccagcagccgcctcaggaagcccaggaaatgctcggccgtgcggatggagccaggcactgcctctgcgaggagacgctatcagcggcgacggggaggcgggaaagggactggggggcagcggggggtcggggctcaccctgcagcacttcgtcgggcagcacggggttggccaggtgggcgtccgtctcccgggcggcgctggcctcccgcagcccctccaccagacgccggtactcgtcccgcaggcgctgctcgtctgtctctttgatcctgcggagagatgagctggggctgggagggggctggcaaccctggggacaagtcagacaggggccagggtcccaggggcagggcgggcaccaccgccagacgtccccggccccacctgagcaccgtcttctgcagggtctccaggttgccctggcaccggtcaagggtccggcgggtgaggttgacgctcatggagtcgatgcagacgttgtctggagaagggggagagagccggctcaggcaggcctgcaggggcctcactcagaggggctggcatccctttggcccctggcgcccccctcaccaatgttgtgggcctcgtcgaagaccacgacggccttgcgggccagttccttggacaccaggtctgcaatcttggggtccaggaggtagtggtagctataaaccaccacattggcatgcaggatctggggggccggggagcagggttaccagggccctgccaccccaacccctacccctacccctggccacactggcccgtcactcccacacaggcctgcacaggcagacacaggccaggcagaagtatgagcagatggatagagacagaccaacagatacgggcacccaccaacagggagatgcagacaggcagactcacagcaagcaacagacagacatgggcagacaggagacgggcgggcagcccacaccctcacactcgcccctctgcccatcccaccagcctcctcactgagtatcgagcaaggaagtatgggcaccagccctggcgccgccccagggccttcaggtcatccaggttgtagatgccagcggggaggggcacctcacgcccatgggcatcaaattcctgggacaagagtgccaggggtcagggaggctgcctgccccaggctacctgtcctgcctccctccctcagccctgccctccagtaacctcatagaatcggcagtggggcaggctggtgtcatgctggtactgcgcccgcacataggaggctgtgaggctgtggcatttcccatcgacgtccttcccaaagcgcaggggtgtcacctgggggtgtggggcatcttagcacccagacagggtggaaacccaaccactcttcaaaccctggtctccacacctcccagctggctggggttttggacaacttgaacctcagtctgttgcattattagttaaga[133 bp omitted]ccaacatggtgaaaccctgtctccactaaaaatacattagccaggcgtggtggcacatgcctgtaatcccagttactcgggaggctgaggcaggagaatcgcttgtatccgggaggtggaggttgcagtgagcagagatcgtgccatagcactccagcctgggcgacagagtgagacaccatctcaaaaaaataagtaaaaataaaaatacaaaaatgagccaggtgtggtggtgcacacctggaatcccagctactcgggaggctgaggcaggagaatcccttgaacccagaaggcagaggttgcagtgagccgagatcatgccactgtactccaccctgggccacggagccagactccctctcaaaaaaaaaaagagtagcaaaattgttacattcttacaactacaagttatacatacatatttttggagacaagtccctctgctactcaggctggaatgcagtggcccaatcacggctcactacatccttgacctcccaggctcaagtgatccttcccccactcagcctcccgagtagctgcggccacaggtgtgcaccaccatgcccggctaatttttgtcttcttagttgagatgaggtcttgctatgttgcccaggctggtctcaaactcctggtctcaagcaatcctcccacctcagcctcccaaagtgctgggattacaggctgagccactgcgcccagccagccaaaactaatattttattttttgagacggagtcttgctctgttgcccaggctggagtgcaatggcacgatcttggctcaccacaacctccgcctcccaggttcaagcgattctcctgtctcagcctcccgagtagctgggattacagacatgtgccaccacacccggctaattttgtctttttagtaga[139 bp omitted]gcctgaaaaatctttagcatataggttgaagataactacttcatccttggaaatgccaaaacgcatggaaccttggcagggcctaagaatcaaaggaggttccacacagtctgggactccccttacccctgacctgctctgtaccctctaaggcaccatcacagcctaaggctttttctgaagaacaaatccttttcctacgccaaaaggaaagctccaaggcagccagcccttccttctccatttcccctttcatcagtcaccgaggcctgtgctctttgtcatccactagatgtattatttctcacatattcttacaaataatgtgatataatatatagtctgtgggcccagtgtgggagtttgagaccagcccggccaacatgatgaaaccccatctctactaaaaatacaaaaaactagcagggcgtggtggtgggtgcctgtaatcccagctactcaggaagctgaggcagaagaatcacttgaacctcggaggtggaggttgtggtgaaccgagatcacgccactgcactccagcctgggcaacaagagtgaaactccatttcaaaaataataataataaataaggctgggcacgatggctcatgcctgtaatcccagcactttgggaggctgaggcgggaggatcacaaggtcgggagttagagaccagcctaaccaacatggtgaaacaccgtctctactaaaaacacacaaattagccgggtgtagtggggcacctgtaatcctagctactcaggaggctgaggcaggagaattgcttgaacccgggaggcggagcttgtagtaagccaagatcactcccctgcactccaggctgggtgacagagtgagactccgtctcaaaaacaaaacaaaacaaaaatatatatatatatacacacacacacacacacacacacacacacacatataaaaacatatatacacacacatatatatgtaagtataatatatacacatatatacattctgtgggttaccacatgtaaagtattcagaacagtgcctggcacacagtgagtacaatttttttttttttttgagacggagtttcactcttgttgcccaggctggagtgcagtggcgcgatctcggctcactgcaacctccccctcgggagttcgagcaattctcctgtctcagcctcccaagtagctgggattacaggcatgtgcccagctaatttttcaattttttttcagtagagac[135 bp omitted]ttaatgataactaatattgtatttgtcatatatcattatgcatataaatatcatgacaatttctttttttttttttttaagacagagtctcactctgtcacccaggctggaatgcagtggcatgacctcagctcactgcaacctctgcctcctgggtacaagcgattggcattaccgacgtgtacaccaccacccccggctaatttttgtatttttagtagaaatggggtttcgccgtgttggccaggatggtctcgaactcctgacctcaaatgatctgcccacctcagactcccaaagtgctgggactacaagcgtgaaccactgcacctggcctatcatgagaatttctaacattcttttagctctttgtacatgctaagggcatcggctgcaacatttcacccaattttatcatcagcaaccttatgaagcaggtacataattatccccattttacagaaaggaagactgaggcccaggtggcagaaaatgcctctccataaatactgggctagtaagtttcagagccaggaaaccaggcttgccagagactctaagagctgcctttttaacctctcctaggcctgggtagaatttgaagactccctggaggaagtgtgcttgcctgggccacgatgaatgagaatttgaccactgagacgggaattctgtgtgtagccactgcatgcctttgcaagagatatggcctggggatccaggacttgtggttggacgaaagagttttctctacctctgggctaagggcaaggagaaggaacaggtgctcacctcagggtgaatacacaagtttttgcgggagctcagagccagtcccagaaacggcagcttctcgccctcctgcttctcatagaagttgagcaactttcgaagctcttcaatcacctactccaaagttggggggcagggggagcttgtgctcattggaggcacaaacccctgccctgccaggtcccagtctcttccccagcttcccaaacacccccgaaagctggtgacggccaccgccagggggaccaatagggcctagggaacagtggggctggagcaccaggatgagtcccagcttaccttctcaatctctggcacagttcttgagcagtagatgagtttggtcacctccagcggatatgcctgccgataacaagcggactcagtccctgtcccgccccttcctttgtctgcctttacgggttcagcgcatcactcactctctggtatgccatgatcagggccaacagggatactgtcttcccggtgcctgagggcatctccaggactccatgaccctgcatgttggggaccagaggggcaacacacagggtctcagaaccttgggcacacaaactctggggactctccccgacccccaatgccaccaactcagaacagcaggataacacagcagcagttaagattgggcagtgggtttgaacctcacttctgcctcctccttgttgagtggtcttaggcaagtaccttcacctccccagacctcagtatccctatctctaaaatgagcctaaagccaggcgtggtggctcacacctgtaatcccagcactttgggaggctga[134 bp omitted]aataaaataaaatgggcctaataataaaaccttcctcataacatgactatgaggattgtgagaaattgcaggttaaatatttggcacagtagctgatatatagtgaacttttctcccttcttttttaagagacaagtgtcactattgcccaggctggaatgcagtggcacaatcatggctcactgcagcctccaactcctggcctcaagcgatcctcctgcctcagcctcccgagtaggtgggattacaggcgcccgccaccacacctggctaatttttgtatttttagtacagacggggtttcaccgtgttggccaggctggtctccaactcctgacctcaagtgatccgcccgcctcgtcctcccaaagctctgggattacaggcgcgagccaccgcgcccagcctattcaccattattgttttagataacggaagattatggggtcctggattcccagggacctcggacttctaaaatccagacgtcctgcaatctgtcttaggcccaggcgtggcagccccaccggtcgagtgggcgggtcgggcccaccggccacccaccttggcgtccagcgtgcgtttgagctcccgcatgtaggagaactgctcggggtagatgtagtcgtacgggaagtagaccaggagcccgtccacgttgagcctggcggcaggggctgctgggtcagttcccgtcccctcagcccctctcccgcctccacagtgcccggtcgtcgagcccagagaagggtgacgggcccggcgcccccggtaaccctcaggtcctcaggagcctcggggccccctcagtgtctcctcgctatcactgctgctccctgcggctgcccccgtcccaccccttcaccctcccctcgcccccttggggacccaggcgcgcccaccgatgaccccatcttcaagaccccccgcgcccgctagcgagcgcgacccccagcccccttctcacttcatggcgccggccggactgtgcagcggggtcgacccgcctccctcatgaatattcagcgagaggccgggtcgtggacatcctcgagggctcgctccacctatattacgagaccattggctaacctgcccgtcaatccgctagggcagagccaatcgggatactgcgcgtgcgcacggaaaagcgagggcggctgactctcgggtgaggcggtgcgggaggcgtcactgaggatcgtcgagggccaatcaaaaagaaaacatggaagggaaagagccgagagactcgatctcattcactagaatttggtcctcctgcgcctgccaagattgtctgagtattgatcgaacccaggagttcgagatcagcttgagcaagatagcgagaacccccgcccctccacctcgtctcaaaaaaaaaaaaaaatcgtctcagtagcgaatagtctaacggagaatgacagggaaattggtgatcctttctgggcccaagagttagaaatggctttgcaggccgggcgcggtggctcaagcctgtaatcccagcactttgggaggctgaggcaggtggatcacctgaggtcgggagttcaagaccagcctgaccaacatggagaaaacctgtctctactaaagatacaaaattagccgggcgtgctggcaaatgcttgtaatcccagctactcgggaggctgaagcaggagaattgcttgaacctgggaggcagaggttgcagtgagcagagatggcgccgtcgcactctagcctgggcaacaaaagcgaaactccatttcaaatattaataataataactaataaataaaacataaatgctagcttttgtttgtttcttcaacaaatagctatgtggcatctaccatgtgtctgatcctgtgctggcccctgggaacagaaaggtgaccatgacagcctcagcacctgccctcaaagaacagatttttttccttgagacagggtctttctctgtcgccaaggctggagtgcagtggcacagtcacagctcactgcagcctccacctcttgggctcaagcgatcctcccacctcagcttccagagtagctgggaccacaggtgtgcaccaccaagcccagctaagttttattttttaaatttttttagagacgaggtctcaccacgttgcccaggctggttaaactcgcaggttcaagtgatcctctcccctcagcctttcaaattgttgggattacaggggtgaggcaccaggcctggcctcaaagaacagatattaaatatacaaatgaatatatgattacagcctggagtggtggctcgtgcctgtggttccaacactttggaaggccaaggcgagtacattgcttgagctcaggagctagagaccagcctgggcaacatggtgaaaacccgtctctacaaaaaatgcaaaaattagctgggcgtggtggcgtgcacctgtagtcccagatactcaggaggctgaggtgggagaatcacctgggcctgggaggcagaggttgcaatgggcagtgattgtgccactgcactccagcctgggcaacaggagtgaaaacctatctcaaatgtgtgtgtgtgtgtgtgtgtgtgtgtgtgtgcgcacgtgtataatcacaagtacaaaagtgctgtgaaggaaaacttcaagtcaccataaagattgattatgggctgggtgcagtggctcatgcctgtaatcccagcactttgggaggccaaggcagatggatcacgaggtcaggagttcaagaccagcctggtcaacatggtgaaaccctatctctactaaaaaaaaaaaaaaaaaaaaaaaagccaggcatagtggcatgcatctgtaatcccatctactcgggaggctaaagcaggagaattgcttgaacccaggaggcagaagtgagccaagatcacgccactgcactccagcctgcgtgacagagcaagactccgtcccagaaaaagaaaaaaaaaaaagacttattatgacaggatgtctactgtcaactgtggggtgtgagtgttggccaagtgatcagagaaggcttcgtggaagaagcgaggtttgagtagagccagaaaataattagaagagatcaaccagcaagaggggatggatgagagaagtgagaaaggtgttccagggagagagaccatcatacacaaaagctctaggccagaagaaagctgaggcctgtgagtgctgaaaggaagcctgtgggggtggagctctgagttgagcacagggagcagagaaagggcagctggaggggaaggcaggggcagatcgaaatctcttttttaaattaattaattcttaatttatttatttttgagacaaggtctcactctttcgcccagactggagtacagtggcacaatctcagcgcaccgcaacctctgccacccaggctcaagcaattctctggcctcagcctccctagtagctgggattacaggtgcgcaccactactgcccagctaatttttatacttttagtagaaacggggtttcactatgttggccaggctggcctcaaactcctgacctcaaaagatccacccacttcagcctcccaaagtgctgggattacaggtgtgagccacccttcccggctgtatttttggagacagagtcttgctctgtcccagcctggagtatggtggtgtgaatttggctcattgccaccttgacctccagggctcaagtgatcctcccacctcagcctcctgagtagctgggactgcgggtacacgacaccacgcctggttaattttttttaattttttgtagagacgagggtatctcactatgttgtccaggctggttgaactcctgagctcaagcaattctcccacctcagcctcccaaagtggtgggattacagacgtgagccactgtgcccggcttaatttatttacataaatttttttatgtttacttttctatctcctacaggaagaaaatatattttgttattgacagggtctcgctatgttgcccaggctggtattgggctcaagccatcctgttccctcagcctcccaaagtactgggattacaagcgtgagcctctgcatccagcccagatccaaaatctttactgtcacctacagagtcctctgtaactagcttactgctcatcatccccataccaacccaccttactgctctgatctcctcctctctctcccccagctcattttgtttcagctatgctggtctccttgctgtctctaaaacataacaagcacatcccatctcagggcctttgcaccagctattttgtctgcctggaatgctgtttcccctgatagccatgtggctgacacactcacctccctcagctctttgctcaattgtcaacttctcggcccggcatggtggctcacacctgtaatcctaccactttgggaggctgaggtgggcagatcacctgagatcaggagttcgagaccagcctggccaagatggtgaaatcccgtctctactaaaaatacaaaaattggcaaagcatggtagcacataccagtaatcctagctacccgggaggctgaggcaggagaattgctggaacccgggaggcagaggctgcagtgagccaagatcatgccactgtactccagcctgggtgacaaagcaagactctgtctcaaaaaaaaaaaagtctccttctcaatgagggcttcctgaccaccaaattaaatctacctcctagacacacacacacacgcacgcacgcacgcacacacacacacgcacgcacgcacacacacacacacacacacactatatcccctttccctgctttattgttcttgagagctcatttaaccatgtgacatgct[134 bp omitted]cacggtgaaacctcatctctattaaaaatgcaaaaattagctgggtgtggtgtcgcatgcctgtaatcccaactactcagaaggctgaagcaggagaatcgcttgaacctgggaggcagaggttaacgctgagccgagatcgcgccattgcactccagcctgggcaacaagagtgaaactctgtctcgaaaaaaacaaaagtcagctccatggcaggagtgatggctcacgcctataatcccagcactttgtgaggccgaggcgggcggatcacttgaggtcaggagttggagaccagcctggccaacatggtgaaacctcatctctactaaaaatacaaaaattagccgggcgtggtgacacatgtctgtagtcccagctacttgggaggctgaggctggagaatggcttgaacctgggaggtagaggttgcagtaagccaagatcgcgccattgctctccatcctgggcaacagactccgtctcagaaaggaagaaagaaggaaagagagaaagagagaaagagacagagagagagagagaaagggagaaagagagaaaggatggaaggaccctgacaagcactgttgcataaaagtttcttttctctctcttttttttttttttttttttttgagacagggtctcacttctgttgctccagctgaagtgcagtggtgagaacatggctcagtgcagcctcaacttcccaggcttaagtgatcctgccacctcagcctcctgagtagctgggactgtaggtgtgcaccaccgtgcctagctaattttttgtatttttagtagagacatggttccgccacgttgcccaggctggtcttgaactcctgggcttaagggatctgcccgccatggcctcccaaagtgctgggattaccagcgtgagccactgtacccagcctgagtataggtttctgataaattttaggatcatattgtttggactgggtaagaatttccagaactctaatgaagaaactgactggtttatattttattttattttattttattatttttgagatggattttcactcttgttgcccaagctggattgcagtggcacgatcttggctcaccacaacctccgcctcccggtttcaagtgattctcctgcctcagcctccccaggagctgggattacaggcacccaccaccatgctcggctatttttttttttatttttttatttttagtagagacggggtttcaccatgttggccaggctggtctcgaactcctgacctcaggtgatccacctgccttggcctcccaaagcgctgggattacaggcatgagccactgtgcaaggcctaggctggtttataaaattgctaaaccaagcagaacatgaattaaataccaaggaaatactctcctagattgtcatgttacatcagccaatactaaaattgtcaagatacacaatttgaatgaactccatggtccaagtcgaattatctatgatattacccatctaataaacagcactatgtcccttaatgggagaaaaagttggagaatttaagagaatatcaatccaatgttggttgggtgcagtgaatcatgtctatattcccagcactttgggaggccaaggcaggaggatcacttgagcccaggaattcaaggccagcctcggcaacacggtgagatcctgtctctacggaaaattaaaaaaaaaaaaagagagagattagtgggatgtggtgcctatagtcccagctacttgggaggctgaggcgggaggatcatttaagcctgggacgttgaggttgcagtgaaccatgagtgagactcatctcaaaaaaaaaaaaaaaatggcgatcactagaggaaaaaaaaactaaagtggggtttgcgggtagtgggagggcccttcctgctaggttgcactatgatctccagggaggctccacgggagaatcatttccttgtctttttcagtttctagagccaaattctttgcataccttgcattccttggctcggaaccccttccctaaccttcaaagctggcagctagcctctggctcaagtgtcacatggcctgtctctgtcttcctatccaatcttcctcttataagaacattggagccaggcatggtggctgacgcctgtaatcccagcactttgggagaccgaggcaggcggatcacaaggtcaggagttcgagaccagcctggccaacacagtgaaaccccgtctctactaaaaaaatacaaaaaagtagccgggcatggtggcaggtgcctgtaatcccagctacttgagaggctgaggcaggagaatcgcttgaacctgggaggcagaggttgcagtgagacgagatcgtgccactgcactccagcctgggtgacaatgcaagactccatctcaaaaaaaaaaaaaaaaaaagaacactggagaccaggtttagggctcactcagatactccaggattattgtctcattttcagatcctcaaggtcagcacaactgcaacctcccttttaccatataaggtcacattcacagattatgaatttgacaaaccaaaaattggtcataaactatgttagcaatttggaaacagtcatcatagcaatatatttcatttgaatcattatctctctcatgatgaatcacggagtgcagaggtttggttttatttattatttttctttttctttttttttgagacggagtctcgctctgtcacccaggatggagtgcagtggcgcgatctcagctcactgcaacctccacctcctgggttcaagcaattctcctgcctcagcctcctgagtagctgagattacagacgcccaccaccacgcccggctaattttttgtatttttagtagagatggggtttcaccatcttggccaggctggtcttgaactcctgacctcatgatccacctgcctgggcctcccaaagtgttgggattacaggcgtgagctatggctcctg[140 bp omitted]aactccatctctactaaaaatacaaaaaattagccggacgccatggcgggagcctgtagccccagctactcgggaggctgaggcaggagaatggcatgaacccaggaggcggagcttgcagtgagccgagatagtgccaatgcagtccggcctgggcgaaacagcgagactccgtcgcaaaaaaaaaaaaataataataaataataaataaaaataaaaataaaataaaaaaataaaaataataaaataaataaaaattattttgagacaaagtctattctgtggcagaggctggaatgcagtggcgtgatcacagcttactgcagcttctacctcctgagctcaagcgatccttccaccttggcttcctgagtagctgggacctcaggtgtacattaccacgctcagctaattatttatttatttattatatttttgtgacggagtttcgctcttgttgcccgggctggagtgcaatggtgctatctcagctcactgcaacctctgcctcctggattccagtgattctcctgtctc[218 bp omitted]ttgctctgtcacccaggctggagtgcagtagcgtgatctcggtttactgcaacctccatctcccgggttcaagcgattctcctttctcagcctcccaagtagctgggactacaggtgcacaccaccacggcgggctaatttttgtatttttagtagacaccaggtttcaccatattggtcagactggtctcaaactcctgacctcaggtgatccatctgcctcagcctcccaaattgctgggattacaagcgtgagccacacacctggcttaatttttttatttttgatcgacacagggtctccctatgttgtccaagctggcagagatttttgtttgtttgtttgagagggaattttgctcttgtagcccaggctggagtacaatggtgcaatcttggctcaccacaacttccgcctcccgggtttaacagattctcctgcctcagcctcccaagtagctggaactacaggcacctaccaccacaccaggctaatttttgtgctttttagtagagatgaggtttcaccatgttggccaggctggtcttaaactcctggcctccagtgatccacccgccttgacctcccaaagtgctgaaattacaggcgtgagccaccgcgcctggcctctcaacctacaatttcaacacccaaggaaacagcccaccatgagtgagaaccagcagacacaacaaactataggattagctgcctccaaacttcaggtgatagaattatcaggcatgtacttgaaactaaaggacacaaaagaagaatccgaaatataaaataaaggattggacttgtgtgaaaagaatcccttagaaagggctactttcaggctggccatggtggctaatggcctgtaatcccagcactttggaaggccgaggtgtgtggatcacctgaggtcaagagttcaagaccagcctggccaacatggtgaaaccccgtctctactgaaaatacaaaaattagccaggtggggtggcagatgcctgtaatcccagctactcgggaggctgaggcaggagaatcgcttgaactcaggaggcagaggttgcagtgagctgagattgcgctatcgtgccccagcctgggcactagagtgagatcaaaaaaaaaaaaaaaaaaagaagaagaagaagaaagggctactttcagactgccttgccaaaaatcataaccacaatgatgagcatgtattgagtcaaaacagaatcaaaagagaagaaagtcaatttctgtgcaaactacttttatttataaggaaagtttctctattttgtttataaacattaaaccagtgctgtgtgaaggcacttaattggggagaggtggggcagggatcctggtagagaccaatgtttcccacccagaccccaagactgctgggagagatggtgtcagcagtgactcccaggaatatccagtggtgtggtggcccatcccaggcccggctgggcaggtggctggcttgctgggggatgtgatgatggtggtaggcatgggaggcactttggacgggatctgatttggcaaaaggaagtggtttcctgtccccagtgatttccagcccttcccagacctcccaaggctaaggcagattactaaatttaaggctggggccctccttcttccctggacttccaggagaacagagaaccggtggcaaggaccaccaccagcagggtgaggggtgcagataaaggcagcaaaaaacagagggagaggtctggagggaaggcaggaatgcttgtttctgtcagcctcagaaacctccttctatcctgctagactttactcctttgaggcttcaccctggggaacagctggggagagacaggatcttcagacatcaggagctcccacctcctcatcccacatgcaaatccgctgcctgtctctatcctcccaccccttcctaaggggacctctcagcacctcccaaactgctccagaatccaagttctgtgtcacctccaagaaccagatggaaccttccaatcagagcctccactgatgaaatggaatatttccagtgtctcctaactgccataaggagaagcccacctctctctaacaccttggttgtctttttgggtcccacctccatatttaaaaaatctcctctctcagggccgggagcagtgggtcacacctataatcccagcagtttgggaggccgaggtgggtggatgacctgagctcaggagttcaagacaagcctggtcaacatgacgagaccctgtctctactaaaaacacaaaaaattagctgggcgtggtggtgcatgcccgtaatcccagctacttgggaggc[132 bp omitted]gaaaaaaaaaaccaaaataaaaaaatctcccttctcaggaatgtaacggaatcttccttgccttctcccctaaccctaatagagaattttcctcagttacactgtaattttattaatggatttttcctcattctgcccaatgcagtgtaatgaaagcttcctctccatctgttatattatatataaatatatattatatatttatatattatatatttatatataacatatatttttattgtcacccaggctggagtgcagtggcaccatcagggctcactgcaggatcaatctcccaggcttaagcgattctcctgtgtcagcctcctgatgagctgggattacaggcacccgccaccacacccggctaactttttttttttgtatttttagtagagatggagtttcaccatgttggccaggctggtctagaactcctgacctcaggagatccgcccgccttggcctcccaaagtgctgggattacaggtgtgagccacctggccgggccctccacttccttcttgtacattgctgaatccctgtgtcagccctagaggtccagtcttttgccctctcccagccttaatctacaattctgtaacccacccaccatcattaaaatgagattcttctttgtcgcttcccttggctaaaatggattattctttaacctctccaccaatacaaccagggatgataataaaaacattggattgagcagaaaccaatcaaataactagtaaggcagtactggcgagcaccctacatcctgacagctttataaagggcgcttccagccaggtgcggtggcacatgcctgtaatcccaggactttgggaggctgaggcgggcaggtcacctgaggtcaggagttcaagaccagcctggccaacgtgatgaaaccctgtctacacaaaatacaaaaaaaaaaaaaaaattagccgtgcgtggtggcatgcgcctgtcatcccagctactctggaggccaaggagggaggatcacttgagcccgggaggcagaggttgcagtgagcccacatcttatcactgcactccagtctgggtgacaaagcaagactccatctcaaataaataaatacaaattggccgggtgcggtggctcatgcctgtaatcccagcactttgggagacca[134 bp omitted]ggtt[132 bp omitted]aaatttaaaaataaaataaagggcttttcctcacctactccactaactataagggacccttacccccgacattactattaaatataacggacttttcgtctcctccccatgagcaataatgagcttttcagacctccctctcccaatataacggtttgttcctgttgcctcttctttttcctgtgggatcccccttttccccaacccccaactgtcgggaggtccccatgacttctcccctgggctcaccccgaagtagttccgcggcacgtagccctcctggccgtgcagcgcggcccaccaccagtcggtctcctccggcccgtccctccgcagcacggtgaccgactcgccctcgcggaaggacagctcgtccccgaactcggcgctgtagtcccagagagcgtacactgccccgctgttcatcagccccatactctgctcgacgtctgaaacatgccacggaggggaaggtgagagcctggcccagggggtccaggaacaggggccacgtggggtccaggacagaccctggaatttggcgcctgtcccagcaaccacctgaaatgttgtgtgtgcccatggctgtggatgggaaccggagctggagtcagatgccgggactggccgtctttgagcgttcgaggaaactgggggaggcatgccagt[159 bp omitted]tgcctcagcctcccgagtagctgggactacaggcgcccgccaccacgcctggctaatttttggtatttttagtagagtcagggtttcacc[140 bp omitted]gtcgcccaggcaggagtgcaatggtgcggtctcactgcaacctccgcctccggagttcgagccattctcctgcctcagccttccaagtagctgggattacaggtgtgcgccaccatgcctggccaatttttgtatctttagtaga[154 bp omitted]cctagaggtccagtcttttgccctaccctggcgcttagcttaagtggtacagtctctaaggaagattcgcaccttccttgaatgatagggtcctttaagttggctcat[135 bp omitted]cagcctccaaagtagctgggactacaggcccacgccgctacacccggctaaattgttttatatttttaatagagacggggtttcaccgtgttgcccaggctggtttggaaatcctgagctcatgcaatccgcccgcctcgagcctcccaaagtgctaggattacaggcatgagccaccgcgcctggctttctttttcttttcttttctttttttttttcagacaaggtctcactctgccacccaggctgcgggagtgcagtggtgagatcaagcttactgcagcctcgaacttccagattcaagcaatcctcctgcctcagcctcctcctgattctttatgttattattaaatattttgtaggccgggcacagtggctcacacctataatcacagcactttgggaggccaaggca[132 bp omitted]ctcgggagcctgaggcaggagaatcgctttcaccgaggaggcagaggttgtagtgggctatggtgccattgcactccagcctgggtgacagagcaagactctgtctcaaaaaataaataaataaaaataaataaatatttcgtagaggtcaggtgtggtggctcacacctgaatcttagcactttgggaggccaaggtgggcagattgcctgagctcaagagttcgggaccagcctgggcaacactgcaaaaccccttctgtactaaaaatacaaaaaaatgagtcgggcatggtggtgagcacctgtagtcccagctactcaagaggctgaggcagagaattgcttgaatccaggaggtggaggttgcagtgagccgagattgagccactgcactccagcctgggtgacagtgagactctgtctcaaaaataataataaataaatatttgtagagacagggggtctctacaatgtcttgtagcctgaccaggctcacctttcaaatatataaccctctgtctcacccataagtcctaggacctgcctcactccaactctccgtgaagttccttgcccacaccgagatacaactggctcctccaggtgtgaaatgaccctgtgcacaatccccgtggcacagcctacttcgccctgcccgtcggggaaccaggtgatgtagcctgccccctggagagatagggtacagccttgtgtcttcctacaagcccctttctggcagctgtagcctgctcacctgccagtggtgtggcaatgcctctcccacaagtggcagagcccacctgcccagagccctatgccaggtagatggcagggttgaaacgttcagctcctcacccttgaagatgtgaaaggtgagcagaccaatcttcacagccactctcctccccaaaggtgtccagctcgcatagcacagcctccatgtccccttttcccttaggagggcatagtccccccacccccgcaagcggtccatccctcatcctcctcctcggcaatcctgccaagtggttggtacagcccccatacccttctctccctagtagggggtagttgctcccctccccgctcctgcgcacccgccaggtacccaggcgccagcagccctgcctcgcacctgccaggtaggtggcgcagtcagcataaccctcgcggtaagggtcgcacttctcgaaggcggtggcgccgtcgctgagcgtggtggcgaagattgcagcgccgtgctgcaccagcgccatgcagatgactgtgtcgttgcacgacgccgcgcagtgcaagggtgtcctaggcgtgggggtggggggttgcggggaacgatgcgtgagaggctgcgcgtccgcccacgggggacccagcccaccgcgcgggtcggggctcaccagccgtggctgtcgggggagttgacattggcacccgcggtgatgaggaaatccacgatagagtagttggcgccgcagatggcgttgtgcaaggcagtgatgccctcctcgttgggctggctcgggtcgttcatctgagtgcaccgggggagggggaagactcagtcccgcggctggcatctgcgatgcccccgccgtgcccacctcccgctcagcagcgctcacctccttcaccgcctgctgcaccacctccagctccccggtcagcgccgcgtccaggaggagcaccagagggttgaggcgcgcgcggcgggccttgcgcggggagcccgccttccgcagcacagagcgcatctcctgggggacagggcgcagaggtcagcgacttggagggattgttagtatatccatgatctagagtaggaaacagaggtccagggacttgtggcacccatctagacaggggtagaactgggattccctcgggatggggtgagggggtgccttcgatctcctcctagagcctccagttccctgccatagacagggaatcctgtgatttgagaatcttgggccctgaaacttgggagaaagctggggggccatgggattggtggcaaagtaattctatcagttcaaaacaatgattgtggaagccagttatgcaattcacacacagtctcacatttcttttgttaataatgaatgcaatgagacacacatgacaaaatgttaccaggagtgttcattccggatgtttggaatttgagcattttattattccttgtattttccttttctttttctctttttttttttttttttgagatggagtctcgctctgtcacccaggctggagtgcagtgcagtggtgtgatctcagctcactgcaccctccatcccccaggttcaagcaattctcctgcctcagcctcctgagtagctaggattacaggcatgcgccactatgcctggctaattttcatatttttagtagagacagggttttgtcatgttgtccaggctggtctcgaactcctgacctcaggtgatccacccacctcagcctcccaaagtgctaggattacaggtgtgagccactgtgcccagcctcatgggctttcttatttttaattttcctcctgtaagattcatttattctgggctgggcgaggtggctcatgtctgtaatcctagcactttgggaggctgaggtgggaggatcacttgagcccaggagttcgagaacagcttgggcaatatagtgagacccagtctctacaaaaaataaaaaattagcctgacatggtggcgcacacccgtcgtcccagctacttgggaggctgaggcaggaggattacttgaatggaagagaaggaggcttcagtgagccatgatcatgccactgcactctagcctgggcaacagagtgagacccagtctcaaaagaaaaaaaaatgcatttatttattccaagtgtgtgagtgcatagcatttgtgattctggtctttgctgtttccagagtttcagtgattttaagattctggaattcagagatcccaacagccactgaattcaaaattcccagatgctcagttatttcaagtttccaatatgttgtgattgcagaaatgctaggctgtgctatttcaaattgctgaggggccaggactttggaatccaaagattct[149 bp omitted]ctgcctcagcctgccaagtagctgggactacgggcgcccgccaccacgcctggctattttgtatttttagtaaagatggggttt[131 bp omitted]aatggctgggtgcggtggctcatgtgtgtaatctcagcactttgggaggctgaggagagtggatcacctgaggtcaggcaggagttcaagaccagcctggccaacgtggtgaaaccctgtctctactaaaaatacaaaaattaggtggccgtggtggtgcacgcctgtaatcccagctactcaggaggccgtggcatgagaatcacttgaacccaggaggcacagttatagtgagctgagatggcaccatcgcactccagcctgggtgacagagtgagactccatctcaaaaaaggaaaaaaaaaagaaagactagaaggaaatattcaaaatgttaatgatggttccctgtgagtggtgtgattttgtcctctttcttctatttttatttattttccccaagctctctatggtgttggtgtatttctctatagtggaatgtgtaaatttaaagtataaatctcagctgggcacagtggctcatgcctggtttgagaccagcctggacaacataatgagaactgtctctactgaaaatgttaaatattatctgggagtggtggtgcatgcctgtagtcccagccataggggaggctgaggcatgaggatcaattgagcccagtaggtggaggctgcagtgagccatgatcttgccactgcactccagcctgggcaacagagtgagactctgtctcgataataataaccctctattacaacatatcagtgcatgaatttgtgattttataattcaaaatatgagcatctttaattgtcagatttggtgacttcaagaatcagtaataatcagtctatgatactaactttataattattttttttaagagaagagtttccttttattttattttatttgagacagagtttctctctgttgcccaggctggagtgcagtggcgcaatctcggctcactgcagcctctgtctcctaggttcaagcaattctcctgcctgagcctcccgagtagctgggattacaggcatgcaccaccaggcccagctaatttttgtatttttagcagagacggggtttcaccatgttggcgaggctagtcttgaactcctgacctcaagtgatccacccgcctcggcctcccaaggtgctgggattacaggcatgagccaccgtgcccagcctaactttataattctaagatcgtgttcaaacctttaaatgctctagggctctaaaatgttactatcctaagacggtgacactagcgtttgattcttacattctatgattttttaagtttctctgtggccaggactctgtgattctacaatgggatgctcagccatttcaacatgttgttattcatcccctcttgatttcaaaatcctgagcctcaaggttccttgcctttactttcaggagggcctaggaataggcattttgggggggtccacctgacccctgcttctctgagaagtgatctcttcccgctgtctacgcacacggagtgttcaggactgttccatgtggctacaaccctcttcccagtcaagatgcagggaccaagatcagcaggagaccatcccctggtccaatggtgacaacagtaagagcagttaacagttatgtgccaggtattatgctaagcactacattaatgtatttaatcttggcggggtgtggtggctcacacctgtaatcccagcactttgggaggccagggcgggcagatcacttgaggtcaggagttcaagaccagcctagccaacacagtgaaaccccatctctactaaaaatacaaaaattagccaagcgtggtggcatatgcctgtaatcccagccacttgggagactgacgcaggagaatcactttaacccaggaggtggagtccagcacccagccgagactcacttgtttttatttatttatttatttatttttatttttattttttttgagacggaatcttgctctgtcacccaggctggagtgcagtggcgcgatctcagctcaccacaagctccgcctcccgggctcacgccattctcctctc[133 bp omitted]gcctcccaaaatgctgggattacaggcatgaaccaccacgcccggcctatttatttatttatttagagatggagtcttgctctgtcgcccaggctggagtgcagtggtgcagtcttggctcactgcaacctccgccttccgggtttaagcgattctcttgcctcagcctcctgagtagctgggattggaatgagaccaccacttctcctgttgtccttcccagcttctcccccacctccccttttccctagtttataagacaggaaaaaaagggagaaagcaaaacgctggaaaaaaacagaagtacgataaatagctagatgaccttggcgccaccatctggtcctggtggttaaaataataataataatattaatccctgaccaaaactactggtgttatctgtaaattccagacattgtatgagaaagcactgtaaaacgttttgttctgttagctgatgtctgtagcccccagtcacgttcctcacgcttacttgatctatcgtggccctttcacgtggaccccttagcgttgtaagcccttaaaagtgctaggaatttctttttcggggagctcggctcttaagacgctgatgctcccggccgaataaaaacctcttccttctttaatccggtgtctgaggagttttgtctgtggctcgtcctgctacagaattacaggcacgcgccaccgctccgggctaatttttgtatttttttagtagacagggggttt[144 bp omitted]agtggctcatgcctctaactgcagcaatttgggaggctgaggcaggtggatcatttgaagtcaggagtttgagaccagcctggccagcatggtgaaacctcatctctactaaaaatacaaaaattagccaggagtggtggcatacacttataatcccagctacttgggaagctaaagcgggaggatggcttgaacctgggaggcggaggttgcagtgagccgaggtcaagccactgcactccagcctgagtgatggagcaagactctgcctggaaaaaaaaaaaaaatagaggagagagcagagcagacacaagagacacagagacagagagggagagaagagagggtgactgctttgattcaggcaagacttctcagtcccagaatgaacccactgttgtgccaagactcagtcatgtccaggtgtatgactcgagattgctgaaggaatgcccggggcagggcacaggcacaggttattggagagaaggagcagagaacatctctatgtggccaagactcccagatggccctccatatagtcacacacagctatcctaaagactacatttcccagcatcccattgcaatgaggctcctggccagtgggagcaggcagagtgatgtatggaactcccaggttctgcctgaaacaggaaagggcactttctcttcttctttctctcttcctggctggagggcagacttggtgacagccatctaggaccatgaaggcaggcttactccccgatggatggcagagccccaggtagatagagcctgggtcctgactccagtgaggtgcctacagtcctgggctgcaaactcttggacttctactcaaaagaggagaaaacttcgatctcatctaagccactatatttggggggctctttgctacagctcctggattcatgtagcaaacataccccggtttcctcctgtattacttaccatgctctgcggctgctctggtgggctgctctgggacggggccgggggtggaatgggagctggtggggcaggagcagggggccctgccctggcctcagatccctcagtgatgggggacagctctggctccggccccccgggccctggccccccatgacgatggaagaggcggctgatgatctgctggtactgtttcttgtgggtagggggcagggccacagcaggggcctgctccatggagcccctgcgtttgaggggccggggaatttccgccaacacccgtgccacctcctccagctcgggcaccgactgtgcctccggtggcagtgctggctgcagcctcgtggggctgagaggccttgctacagggccttcatccacatcgccagcctccagcactggtgtcagcagcccctctatctccggctcaggctccagctcggtggggggtttggggggtcctagccggaacaagagcccatcagaggacaggtccccaggagacacccaacactccctctccacaacttccagggcatacaaccagcacatgattttctgtgtgacctcagggaagttccttgccctctctgggctacactttccttgggctgtgaataatatacaattatgatgcctcccatttattgagcagttagtatgtgcctggcgctttacatgcctaccttattgtaatctcaccactgctttgtgaggtagatacactgccatctccacattaccgaaagggaatctgggcctcagagaggacaagtcagttgcccaaagccatgcagttgggacttgaactcagttctggctgactctagaatctacttctaccaaccgtgatagatgtgattttctgagatcctgagagtttcctctcctaacatctcaggcagaaaactccagcaggaagtagaatcctggtgtttaatgatttcttctctgtcttactcattctgacagtaaagcaggtggaaataaaaatatgcattattggctgagtcgagtggctcacacctgtaatcccagaactttgggaggccgaggcaggcagatctcttgagatcaggagtttgagaccagcctggccaacatggtaaaaccctgtctctactaaaaatacaaaaaaaaaaaaaaaaaaaaaaaaattagctgggcgtggtggcacatgcctgtaatcccagctactcggaaggctgaggcacaggaatcgcttgaacccaggaggcggaggttgcagtgagccgagattgcaccactgcaccactgcactccagcctgggcaaaagagtgagatttcatctcaaaatatatatatatacacacacacacacaaacacacacacacattatatatatagtgtatatatatttttatatagtatgcatatacatataaataatacacacacacacacacggctgagcatggtggctcatgcctgtaatcccagcactttgggaggctgaggtgggtggatcacctgaggtcaggggttcgagaccagcctggccaacatggcaaaacctcatctctactaaaaacacaaaaaattagttgggtgtggtggtgcatgcctgtaaccccagctacttgggaagctgaggtaggagaatcgcttgaacctgggaggtgtaggatgcagtgagctgaaacctcaccactgcat[215 bp omitted]gaggcaggagaatggcgtgaacccgggaggcggagcttgcagtgagcaagcaccactgcactccaacctggaagaaagagcgagactctgtctcaaaaaaaaagagtgaaactctgtctcaaaaataaataaataaataaaccccaaaacacacacacatacacattatttcattgaatccccgtcacaattctatagggtagatattattaatctctcttcacagacgggaaacagagtttcggacaagtaatttatcttcagtcacacagcaagttagcagtgaagagagactccagcccatctgcttaactcactgatctcacacctcaaaatattaataaattattataactaatatggtagctatttatttgagactgggtctcactctgtcacccaggctggagtgcagtggcgctatcacagctcactgcagcctggatctcccaggcttaaatgatcctcccacctcagcatcctgagtagctgggactacaggcgcccactaccatgcccggcagattttttgtacttttatttttagtaaagtctattttagtttcactatgttgcccaggctggtcttgaactccagagctcaagcaatcctgtctgcattagcccaccaaactgctaggattacaagggtgagccacggtgcctggctaatatggtagctattgatagcttactatgtatcagatcctatttatttatttatttttgagacagagtctcaccctgtcacctgtgctggagtgcagtggcatgatcttggctcactgccacctccgcctccttggctcaagctgagtagctaggactacagtggtgagccaccatgcccagctaatttttttttttttttttttttttgatagagatgggatttca[131 bp omitted]gaatttaataacatatgtcaataggatcgattctatcattatttgcctttttttttttttttttttttgaggcagagtctccccgtcacccaggatggactgcagtggcgcaatctcggctcactgcaacctccacctcccgggtccaagtgattctcctgcctcagcctcccaagtagctgggactacaggcgcccgccaccatgcctggctaatttttgtatttttagtagagat[136 bp omitted]gaggcccagtgaggttaagtgacttgcccaaggtcacacagcgtggaaccaggcagtctggcttcagggtccacacttaacctttgagctatccctggctcctacccaaattcccaaactcacctggcctagctctctgcagggacagtgcttgtaaagaggcatttggctgtgatctccccacctcccagggctggtctggtccccctgccatttgtcctcccttcacccagtcctctagggccctcattgctgactcaccttcgttcacagggggccatgtctgttggggatgctggggggctggggtaggggtttggggttgggtctggggctgtgggggcagctggggctgtggttgtgattgtggctggggctgtggttgtggttggggctgcagcttaggcgggggtgctcgggtgaagaggggggacccagggagcatggcgcggctggccccgtgctcccagaaggcgttctgcagcttgaagatcatgctgagggggatgggacgctggcgcggggccccgcggggctgggggctggaggggggcatggggatgcggctgacgggctgccagctgcgaggcaaagtgcccgacggccccgcggagcccagcgagcgccggtagctgcccgcgtctgaacgccggtcgctggccagaggagagaccttgtaattgcgcggcagggtggcgctagtgaggttgtcctggggaagagggaagggagaaggggatcgggtgagagagggaaggtggaggggaggtaaagacaaaagacgagaagggagaggaggtgagggaagccctgggagtgagggagaagaaagggtgaggaaggagcagaaacccagcacagtgaagggagagcgtgggaacgggcgccgagacccagatcgcagccccgagggggagactggccttgaccccgctcccccaccccactcctcgaccttccccagcctctcctccccaggcgtcgcctcctcaccttgccggtgccccccagtccatccaggctgctctccctccaaggcaacagctgcaggctcggcgaggcaggccttgcgaagacgtccaggcctgcggggcgggaatcattagggtctgtggggctgcctctcctccgggtcctccattccccgggcctccaccactcacgttcatagctcgctgtctgcgaaggcttcttctcgtacgccacgtccaggtcagactcgttccaggctttcggaggccgccggcgcagcgtcaggtcgtctggggagaagtttccagggaggatgagacgggaggggtggcgagccccggatcctgcccgctttgaccccgcgagtcaaaggccccgcgaggggcccctgggttcaccttgcgcgcgcagaggcggggcgaatgcgctgccgccggagcctagcagggagctcccgaaggcggacgctggcgcgtcgtaggctgtggcaggggggcgcggtgacggcccacgctcggggaagaaggcctggggcccctccgccagggggctgccgcggggggagcctgcgcggcccaggaagtcgaaaggcgtggggggaccctgctggcggagcgggcctggcccgggccgcggggagggcgcacggccgagggagctgcctgcgccatcgaaggcgcggggccggggcgaggtcgcgcggtccaggctgccgtaggcgtccggctgcaggtagagcggggtgcgcggcgacgacggccgtcccttgggggacagcgggctgtaggggtgtagggttggggcactctctgatcgtccgaacggggtgtctgcgccgtcggtggccgccttccggggggaccctcggctgccgaagggctcagggatcgagctggagctgtaccggggcggctgtggggaggccagggcattgagggatggatcaaaggagacattagtggaagggttggtgtgtgggcgggggtgtcaagagagatcactggaggtcaacccagaggaggctgaccggccatggaaattcaggcacagagagcccaggtgagtagtggtggggagacagccctgaatcagcactgtggctagcccattactctatgtcacctttatgccacttaggtaaacacctctttccttctgagggtccctttagatgtccacttccactggtcccctcttttctatttctttctttctttctttctctctctttcttttctttctttctttcctctctctccttccttcctttctctctctctccttccctccctccctccctccctgcttgcttgctttctctctctctctttctttctttctttctttctttctttctttctttctttcttttctatctcggctcattgcagcctcaacctccctggcttagtgtgatcctcccacttcagcctcccaagtagctgggattacaggtatgcaccaccacacctggctaacttttgtatttttagtagagacagggtttcaccatgttagccaggctggtcttaaactcctgacctcaagtgatccgcctgtctctgaaagtgttgagattacaggcgtgaaccaccgtgcccagccagatttttaaaaaatcatttgtagaggctggtctcaaactcttagtctcaagcaattctctcacctcgccttccaaagtgctgggattccaggtctgagccatcgcgcctggcctggtccccttttttcaagttcccttgaagagcccacaacctgcataactatatggggcaattttgcctgaaatccaggcctctggtctggactgtggcgagaggctggctttggagatcaaggtgggaaccaggcttaccctagaagggggtccggcctgcgggccaggaggcgcgggagagtctgaccacagcgactccagctgcttggtcagttcatccaccttggccgccgccgtgtccagctccatctgcttcagatccatgtgtttcatggccagcgctgggaaggtgggagtggaggtaaggacctggcctcctggcaggggccggcctcagcacccctcgcccgctgccgaggtccccgcctcgccagccccgccccctactccagcttacactggaagttcatgtccagaaagtcccgcgcgctctggaatgcctcgctgtccatggtgccggccggagcgggcgcctgcatggtggggagggagggagctggctaagaccccgcccctctagaccccgccctcagggagtcagacgccgtcaggagcgggacaacgcctcaactcagttccttcccctggaagccctttaccctttcacctccccagctgggaaatgccaactcctccaaagccaagtccatgcgccacggagaagtccaaacccagtctaaaacctccggaattcactttctctttctttttttcttttctttttttttttttttttgtgtatgtgtgtgagacagagtctcgctctgtcgcccaggcgggagtgcaatgacgcgatcttggctcactgcaacctccgcctcccgggttcaagcaaatcttctgcctagctgggactacaagcgcgcgccattatgcccggctaatttttgtagttctgggattacaggagtgagtctccgcgcccggccgtgtccatctctttatctcagtcctaagacctgaatcactccttgaacaattatctattgatcacctacaatgtgccggtaaacataggatggaataactatgaattactgaatgtttactagggaccaggacgc[354 bp omitted]ctagaacccatgcctactgcttggggtataatgtagtaaatgtagtaaaaacaatatccgccgggcgcggtggctcacgcctgtaattccagcactttgggaggccaaggagggcggatcacgaggtcaggagagcgagaccatcctggctaacatggtgaaaccccgtctctac[198 bp omitted]caacaacaataaccagccaggcgcggtggttcactcctgtaacccgagcactttgggaggccgaggtggatggatcgcttgaagccaggagaccagcctggccaatatggtgaaaccccgtctctacaaaaaaatacaaaagttagctgggcatggtggcatgtgcctgtaatcccagctactcaggaggctgaggcacaaggctcacttgaacctgggaggcacaggttgcagtgagcatagattgtgtcactgcactgcagcttgggtgacagagcgaggctctatttaaaaaaaaaaaaattaattgaggggccactcccttctagagtggtgagaaatgccgtgcaccgaaagcttcatttgatggtcaaaaccaccctagcaggcaagaaagcatggctcagaaacatatgttcaaggtcaccctgcaagaagtcggtagtaatcggtttcacacccgcatctaacttattctgggtcatctctaccagattagaggggtcctagagggaagcgactgctcagcttcctttccctagggtccccattcagtggaggtctggctctcactgacccattgttagcaagaggaacagggaggtggccaggggtggaggggcagctgtggtcactggcccagtgggagggagctaggccactaggaaccggtcaggccagcaccatccctatccccatgctagccaccacacccaccagctctgccacctccctgctgcatcgaccacttagctctggcagtataggcagcagggcaggctggggcatgctgatacccgcctctgtctgggaagtcgaaggaacagaacctgttcaggctggcggctcatttggatgaacagggagtgtgtgaccttgggcgttgagtcctctccactccctgggcctcagtctccccaacatcaaagaagaaggcaaatcacctttttttttttttttgagatagggtctcgctctgtaacccaggctacaattgtgactcactacagcctcttgacctcccagctcaagtggtcctcccacctcagcctcctgagtagctgagactataggtatagcctcgcaccaccacacccagctaattttttttttttttttttttttttttttttttttgagacggagtcttgctctgtcgcccaggctggagttcagtggcgggatctcggctcactgcaagctccgcctcccgggttcacgccattctcccgcctc[224 bp omitted]ctaaggcgggaggatcacgaggtcaggagctcgagaccatcctggctaacacggtgaaaccctgtctctactaaaaaatacaaaaaaattagctgggcgtggtggcgggcgcctgtagtcccagctactcgggaggctgaggcaggagaatggtgtgaaccagggaggcggagctttcagtgagccgagatcgcgccactgcactccagcctcggagacagagcgagactccgtcccaaaaaaaaaaaaaaaaaaaatttgtagagacaggggtctcactttgttgctcaggctggttttgaactcctgggctcaagcaatcctcccgcctcagcctcccaaagtgctgagattacaggcatgagccaccacacctggccaaatcagctattctgaaaggcccctttaatctctatgagccccagactttcaaactgtaaggaccttaggactgtaactaaagttctacagagcctaaacccctcagctaaagagcctattgttggaaagttctgagtccaagattctatctttggaacattctagaattctccaatttgtctaacccagaattctgagtctttctgtaccacattctacctaacccagggttgcactgctctggaagtctagatggatggtatagtgcagctggtaaaagcatgagtaagaagtcagacttcaaaaattcaaatctgagggccgggcatggtagcttctgcctgtaatccttgcactttgggaggccgaggggggaggatcacttgaggccaggagttcaagaccaacatggccaacacaatgagaccccatttcttaaaaaaaattaaaataaaatcatcaaatctggcagcaccaccgtccaaccctgaccacagtacctcagtctcgtaatccgtaaaatggggatgaaagttcacctcataggactactgtaagaatccacctggtcagaaggtgcaggaagaattcagagctctgagaattgaggcctcaggaagaagagactacaggaataaaaactcgggcatttagaatttcagagatacacaaacaatactttgttaactgttaaaatagataaatgagcaagtctgtgcagccctaatgccagctgtaagtgactctttttttttcttttggtagagatttagtctctctcgcgcctgtggttaggctggtctcgaactcctagcctcatgggatcctccccggctcgatctcccaaagtattgggattacaggcgtgagccacggcgccatgatccccaaatttccaagattctcagattccatactgacattctctggctctcaggaaatgccaaccctgggtgtggggctgtcgcggggacaggcggtggggacgtcggagccaccagggggcggtcacgcccggacccccgccaggagggcggactgcgcctgagctcaggcccggggaatgcgcagcgggcccgggcaggtgctgtacatcccggggcaagggagctgggccgggcggggtacaagggcggggcgcgggggtggcgcgggccgtgtgtctgttcccaggcctctgcccctgacctctgcctccgagtcctctcccatgtgctcccctctagctctagctccgagctctcccgcgggctctgggccagccgcaggtactctcccctgggctcctctctccgctccacccctggctctccttccctggcctcctctgcaccccagccaggttctttagggctaaggatcctgtggacttcctggaggagtcatcttcagtaggaaccgggtcagagagccagactgagctgggaacacccaggctggactcctacagccctgtcgggtcacactgaatctggagaggctccactgtctctgggactcggtttcctcctttgtggacgtctatggaatgggctagggcctttcttgctctaagcctctacttgggcttgttatttagcttctctgtgcctgtttcctcatgtggaccatgggaagaattaataccttcgcctcaaaggggtatgaggattgagtgacataatttataagccgtgattagaacaatgcagtgcgcgaaataaagttcacacatacaggattcataattaccagatgtccttggctgttcattataataacacagggtctggcaacagagtgaggggtccagactcaatgtaatttttttttcccctaaaagggccctttcaactctttctgagatcatacaagccctgagttttgacacccagggtctcaacttcctgagcccttgcctctcagagtcctaaatttcccctgtacattcctgagtctggccagtgatcaccctcagtcacttagggacgggagggctgggagagccctggaagattccagacagaagctggcaaaagcccagggtgtgggcaatatccactctccagcctccgtttctccactcgtaatgaggagtccttccctggggtcagcaaaccttattcaaagggagacctctcagtcacccaagattcctctagacaatgcgagctttcctacctacctacctaccagctctgagcttggtacacccagagccctgttttggcaaccacggttattatttttaatttcatttcaggttatcatcaaatgcccttcaagcccagacattgggaaacactcctctctcatcagatgctcgcctcccccattctgtttttaatcccccttcttaggacgcatgggggtggagagaacggggagatagacagagggaggtgcctggtcctgccctccccccgcctcaaggacagacagacacctccagaattagcctctgtccctcccttatctcccacaataccccaggtcagacagatgggcgtggaggtgacatttctcacctcagggtcagggcaaggagccctgaggcagaaggttagtcagaaaatctggcgggggcggatggaatcccgtcccccagagagctgcagaagaaggaggaggcagaatcctgaccctacaaactctactgcctgtgtgagctccaagcctcagtttaccccttcctctccgtgtaatggttaaatgcccggctatgcaaacctcccagaatccaatagccgctttccggaattctgccctgggttctagaactacctctgcaaacccagctgtttcccaccccataaggcaataggggagcccacctccgccagggggtgccctagggcggatgtcccttctctggttaggcaggtctgacgcccaggttaatgacatgttgggttcgctcagcggcacagaggaggttggagatctgcctcggtgttttctctcctaccccgcccccatccccgagccgaaaagtcgggggagagccgggacacagcctccggagggaccccgggtacctgtcctgctccacttcaggaacccaggctccactatccctgccccacccttaattctgctcagagacctagaagatcggtcgagacagcagcttgaggctggcagggtggtcacccattccaccttgagccccaccagtctgagcctctcatttctgaccaagactcggggattcgaacccctatactacccaaagactcggcttcctagagccccccagttcgagggactcaggaattccagctccaacgtctccccgggatgaaggggtagaatccctccattccaagaattcaggcatccgaacccgctttccttccctccagtaaaacaggcaacggagtttccttctaaggatccaggtgtcggcgcgccccaaattccgccctgggacctggcgtccgagtcccctcccaatcctcccagggacgcgggtgttgggctttttcagggcctctggtccccaggagggtgaaactcacggatccgggcagatcctggcacctgggggcttcctccagctcgggctccggcttggggagcggagaacggggcggggcaggagctgggaacaggttagacgacgtgacttgggctggagggaggcgggtcccggtggggagggggagccaaggtcgcctcgagcaccttgggacttgtagtcccggagggacaggacgtagcccaagacgatcccatttggattcacccagagtccatttcacagacaggaagggcgaggcccagaagccgagagcgaccaggccagggagatacagaagagccgagacgcctgcctcgctgtggctggagactgactcctgagcccttgccccaccccttcaggcgcactatcccctttcctgatcagtatcccccagggtctctgagcccgaatctccccgtcgataaaaagcgcgggttggatcttcaaaggatgtcccagcaagagttcaaaatcttagtttggactacaacccccagcagcctccgcgaccgccctcgggcgactctttgcctcgggtcctgtgggaattgtagtcctggagcccgcaggggctgcaccccggtgtctctctcgcccacgcgaaggaaaccgtctggagatcctggataggggaaacatttccccttccccttgaccctccctccgctctggaaagcctctcccacctggggagaaggggtgccccaattctggagtaggatcctaaatcttggcagagggggcgggaagtggcgctgacacactggccaggaatgcagtcgggtcaccctgtctagccaccgtctcgcggctccaaccgccgcccaacgcggggcggccccagtgggaagggaagtgggtgcgtcccccaaatctgtgtccacgtgccgctgtttacacgctccctggggcagggaggagtcgccgatcaggtcccttcctgaaagtcatcgaggtttcccacgcatgagactaaacccccgagggcatctacaagtcccatttgatccacaaacgctacaccgtgcccagcaccactccacgcgtgtggggctcctgggtccgaggctccgccctcgagaaccacaagctcctccccctatgtttcccgctcccccggagtccagaagccccgcccctggctggaacttcacgccctccggacggattgcccctatttctccattttcccgcttctcccagtcaagttctgaacttgtgaggcatctgggcctccccagaagacatttaacacagaaagcacagccctactaactagtattcttacctgtctcttcaagaatttcagaccaatcgaccgtcctgtctctttaaggcttaggaagagcagtgtggctgcccctttaaggaggcgttgcaacaaaccatattggacagacgatgggggcgacccatcgggacccgacgggcctctgactccagcaatacagcgaatcagcggctttcgggaatacatttttcggaaaaagacttcttcctcggttttctgctctgcacacgttgaaattttccccagtttttcctgcagatcgggagtcgagcaatgcctacccccgcgctcccgcaccagttgggcgctcccggatgatgccctacccctttggatccacgtggtctgcaacctggtgcgagcagcccgggctacagggttgcctgaggtgtgggtcccaggatggaggagccccaggccggcggtgagggtgcgggttgacggggtgcggagggtgcgttggtggaaggagaaaggggcgtccgagagggttcgggcggaaaaggaggcgtacctgcaagcaggacttgcgaagagcgtgcattcccagtgggcgaacgggaattcgaacggagagagggttatcttgtggggggctacccgtggagagcaaggcgcccccaggggttggatcggtgaaattgaggtcgcccctggggaacaggtgggcagaaaggagaaaccaggttgaggggactggagtgctcacgaggttaagaccaatggaccgataggcgcgccctgcaagattggaccggcaaggaggtgtcagtcgaccccatttccccttctgctgcagatgctgctcggttctcttgtccccccaactttaccgcgaagcccccagcctcagagtcccctcgtttctccttggaggcgctgacgggtccagatacggagctgtggcttattcaggcccctgcagactttgccccagaatggtgagtggtcttgttgacggaaaagagggtcccggtccagaccccaagagcgggttcttgaatttgtcacaggaaagaattagaggtgagtcacagagcacagtgaaagaaacaagtttattggaaactactcctttacagagtagagtgtcctcagaaagcagggggagaaacccacagccctttgttagtatttctacttataagaaactataaggaactatagttaaacttggagtgtgcagataagctcactaaaggtaggggctattggtgttatccacgaccattaatcctgcaacctaagcttgctcatttatgttatatttaagtaatgggggctgcattcttaggacatttggacattctgcaggcttggtggaacatgttctgtatggccataaatattctgtaattataattggtggtcagcctgggatgtggttattttcaggccataagcatgaaccttgtaagtgcctagctactcactttaagatggagtcactctagtcatgttttattaaaaaccagaggccagccaggcgcagtggctggtgcctgtaatcccatcctttgggaggccgaggcgagcagatcacttgaggtcaggagttcaagaccagcctggccaacatagtgaaattgtctctactaaaaatacaaaaattggctgggcgtggtggcaggtgcctgtaatcccagctacttgagaggctgaggcaggagaatcgcttgaacccaggaggtggacattgcagtgagccgagatcatgccactgcactccagcctaggcaacagagcaagactctctcaaaaaaaaacaaaaaaaaaatcaaaaaaccttccctctcctgttccacttaagcctctgccctccctgtttctctctgtagcttcaatgggcggcatgtgcctctctctggctcccagatcgtcaagggcaaattggcaggcaagcggcaccgctatcgagtcctcagcagctgtccccaagctggagaagcgaccctgctggccccctcaacggaggcaggaggtggactcacctgtgcctcagccccccagggcaccctaaggatccttgagggtccccagcaatccctgtcagggagccctctgcagcccatcccagcaagtcccccaccacagatccctcctggcctgaggcctcggttctgtgcctttgggggcaacccaccagtcacagggcctaggtcagccttggcccccaacctgctcacctcagggaagaagaaaaaggagatgcaggtgacagaggccccagtcactcaggaggcagtgaatgggcacggggccctggaggtggacatggctttggggtcgccagaaatggatgtgcggaagaagaagaagaaaaaaaatcagcagctgaaagaaccagaggcagcagggcctgtggggacagagcccacagtggagacactggagcctctgggagtgctgttcccgtccaccaccaagaagaggaagaagcccaaagggaaagaaaccttcgagccagaagacaagacagtgaagcaggaacagattaacactgagcctctagaagacacagtcctgtccccgaccaaaaagagaaagaggcaaaaggggacggaagggatggagccagaggagggggtgacagttgagtctcagccacaggtgaaggtggagccactggaggaagccatccctctgccccctacgaagaagaggaaaaaagaaaagggacagatggcaatgatggagccagggacggaggcgatggagccagtggagccggagatgaagcctctggagtccccaggggggaccatggcgcctcaacagccagaaggagcgaagcctcaggcccaggcagctctggcagctcccaaaaagaagacgaagaaagaaaaacagcaagatgccacagtggagccagagacagaggtggtggggcctgagctgccggatgaccttgagcctcaggcagctcccacatccaccaagaagaagaagaagaagaaagagagaggtcacacagtgactgagccaattcagccactagagcctgaactgccaggggagggacagcctgaagccagggcaactccgggatccaccaagaagaggaagaagcagagtcaggaaagccggatgccagagacagtgccccaagaggagatgccagggccgccactgaattcagagtctggggaggaggctcccacaggccgggacaagaagcggaagcagcagcagcagcagcctgtgtagtctgcccccgggaaactgaggaactaaagaaagctgaaggtgcccacctgggccaccagaaggtgacacccccagaatccctccccagagactgcaccagcgcagccagcaggagcctggcctgggaggacgatttattattacactgggggtttccttggcagctggggtcatcagggtactttcaagaagggctcgtgcaggacatcaaacagcctccgggcctggatgggagggagaaaaaaatgaggaaccagtcattaaaggagctgtttcctgggtaaatctagagtggggttttggttctttattttcccctataccctcaagcatttatccattgagttacaaacaatccagttacaatctttttaagttattattattattattattttttttttttttgagatggagtctcgctctgtcgcccaggttggagtgcagtggcgcaatctcggctcactgcaagctccgcctcccgggttcacgccattctcctgcctcagcctcctgagtagctgggactacaggcccctg[131 bp omitted]ctgcgcctggctaagttattattatttttttgagacagtctcctggtgtcacccaggctggagtgcagtggtgtgatcttggctcactgcaacctccgcctcctgggttccaacgattctcctgcctcagcctcccgagtagctgggcctaaaggtgcccaccactatacccggctaatttttgtatttttagtagagacaggggtttcaccatattggccaggctggtctcgaactcctgacctcgtgatccacctgccttgacctcccaaagtgctaggataacaggtgtgagccaccgcaccctgccaagttattttaaaatgtaccattattattgactatagtcacctggttgtgttatcaaatagtatgtcttattcattctttctttgtgtgtgtgtgtgtgtgtgtgtgtgtgtgtggtacccattaaccttccccatctccctgccagcccctaactaccctccccagcctccaggaactatccatccactcttatctccatgagttcaattgttttgatttttagatacacaaataaataagaacatgcaatgtttgtctttctgtgcctggcttatttcacttaacataataatccccagttcattatgttgtaat[135 bp omitted]tgcctcagcctcccaagtagttgtgattacaggcacgcgccaccacacccagctcattttttcatttttagtagagacaaggt[131 bp omitted]aagagtatccattgtgtgtaagtaccacattttctttgcctggtcatctgctgatggacacaggttggttctaagttttggcaatgtgaactgtgctgcaacaaacaggagtgcagatacctgttccatacactgatttcctttttttggggatatacccagcagtgggattgctggatcatgtggaacctcaacttttcagtttttagaggagcctccaaactgttttccatagtggttgtactgatttacattcccatcaaaagtatatgagggttcccttttcttcacatcctcgccaccatttgttattgcctgtccaccatttgttattgcctgtcctttggataaaagccattttaaggccgggcaccatggctcacacctgtaatcccggcactttgggagaccgaggtgggtggatcaccagaggtcaggagttcaagaccagcctgaccaacctagggaaaccccatctctactaaaaatacaaaaactagctgggcatggtagcgagtgcctgtaatcccatctactcaggaggctgaggcaggagaatcgcttggatccaggagacggaggttgcagtgagctgagatcatgccattgcactccagcctgggcaacagagtgagactccatctcaaaaaataataataagccattttaatagagctgagatggtatctcattatagtttatttttggtttttggttttcttttttgagatggagtctcactctgtcacccaggctggagtgcagtggtatgatctcggctcactgcaagctctgcctcccaggttcatgccattctcctgcctca[137 bp omitted]gcctcccaaagtgttgggattacaggcgtgagccaccatgcccggcctatttttggttttttttgagatggagttttgcttctgttgtccaggctggagggcagtggtgtgatttcagctcactgcaacctccgtctcccgggttcaagagattctcctgcctcagccactcaagtagctgggattacaagcatgcgccaccacacccaactaatttttatatttttagtagagatggggt[136 bp omitted]tgatcaatgatgctgagcaccttttcatatgcctgcttgccatttgtatgtcttttgagaaatgttaattcaaatattttgcccactttttgattggattattatattttatcctatagagttgttagaactcttatcttctgattattgattccttgtcagatggttagtttgcagatattttctcccatcctgtgtgttgtctcttcactttgtggaatgtttgctgtgcagaagccttttattcttttttttttttttaatttttgagatagagtttcactcttattgtccaggctggagtgcaatggcgctatcttggctcactgcaacctccacctcccgggttcaaacgattgtcctgcctcagccttccaagtagctgggattacaggcatgtgccaccatacctggctacttttttgtatttttagtaaagatggggtgtctccatgttggccaggctggtcccaaactcctgacctcaggtgatccagccgcctcagcctctcaaagtgctgggattacaggcccaagccaccgcacctggcttagaagctttttaatttgatgtgatcccatttgtccattttgctttagtttcctatgcttatagggcattactcaagaaatctctgcccagttcaatgtcctggagagcttctcaatgttttcttgtagacgtttcatgcattgaggtcttagatttaagtctgtaatccattttaatttgatttttgtatatggcgagagatagctatctagtttcattcttcctcattggattgcttctgctttgagacaggatcgctctgtcacccaggctggagcgtagtaacatgcttatagctcactgcagcctcaacctcctgggctcaagcgatcctcccacctcagtctccccagtagctgagactacaggcacgtagcaagctcacaccaccatgcccagctagttttttttatttttagtaaaaatgaggtgtccacttgcccaggctggtctccaacttctggcctcaagcagtcctcccgccttggcctcccaaaatgttgggattacaggcggaagccactgtgtctggtctttggttcttttttcaccttaaaactttggggtctcaggttgtgtttatttggggctctctccttcccccaactccttgggttctttcccagagctcttactttctgagggcccaggcctgggcataaggccagatcttctcttgatgcggcgatgagctgttccagagactgaaaggtgaaagcgaggggtcagggcagttgagcacaaaagcctcccctgtcccagctgaggaggggcctcagatattccccaggggagatgagggcctgtgggaaggcaggacgggcaaggggtgggcagggagatggaaggaaatgggtgacaggctttctaaaaaaggcaaggggacagaaatgcctatggggcaggggagccattccttactccaaatgtggtcaggagggtctgactgtccgttttgttgactgacttcacggtggtcagacattcagtcacctggaaagggtggaggcaggagtgtgtcggaagaagaaaggccagcaagactgagcctaggagggcagggctgggtcacagctgtgtccccagactgcctggcgtgcaggaagcactcaataaacgctttttttcccaactgattaaaaagtcatctcaggctgggcgtggtggctcatgcctaataatcccagcactttcgaggccgaggcgggaggatcacctgaggccaggagttcaagaccagcctggccaacacactgaaaccccatctttactaaaaaatacaaaaattagacaggcatggttgtgggcacctgtagtcccagctactcaggaggctcaggcaggagaatcacttgaacctgggaggcagaggttgcagtgagccgagatcatgtcattgcactccagcctgggcaagagagtgagactccatctcaaaaaaaaaaaaaaggaattaggcaggtaattgggcagagggaacagaaggggcaagtgcttggagaagcgagctaggcctgggagaagtgaagtgtgaagtggaggccacggggcttctgagcctgacgggcccttgttgagcctggtgagaagtctgggctttctctcggggtactggggagccatgggaggattttgagctagggagggtagcagcagatttgtgctcaggaaaacccctctagctgcagtttcggtgggatgggccaggaaagacgaggcccagggatgaatggacagtgccttaaaattggaactgaagctcaaccacccaggagctgcggggaggcccaggcagggatgggaggtgaggtggcctcacccgggagacgaagtcctgctctagcttctccatcaggaggtccgctggtttctgctcataggccttgtaggtctccaggtaccgcccagcttcctcggggctgggataacaggatacagggcagccgggaggtgaggtatcagattata[136 bp omitted]caacatggtgaaacctcgtttctactaaaaatacaaaaaagtagctgggcttggtggcgcgtgcctgtagtcccagctactcaggaggctgaggcaggagaatcgcctgaacccgggaggcggaggttgcagtgagccaagatcacgccattgcactcccgcttgggcaacaagagtgaaactccatttcagaaaaaaaaaaaaaaaaaggccgggtgtggtggctcacgcctataatcccagcactttgggaggctgaggtgagcagatcaccaggtcaggagatcgagaccatcccgactaacatggtgaaaccccatctctactaaaaatacaaaaaattagccgggcgtggtagcgggcgcctgtagtcccagcttttcaggaggctgaggc[131 bp omitted]aaaaatcaaaattccagcccatcccccgccaaatacaacctggtagtaaccactgctgggcgcatcttgatatcttttctggctacaggccagctcttgggagcccaaccccacttctccctgggtaaccctgggccagtggtttgctctctgggcctgtttcctcactgtaaagtggggtggtcaggcatagtggctcatgcttgtaatcccagcactttgggaggctgaggcaggaggatcacttgagctcaggagttcaagaccagccgggacaacatagcaaggtgttgtctccacaaaaaattaaaaattagccaggtgtggtggcgcgtgcctttagtctcagctgctcgggaggctgaggcaggaggactgcctgagcctgtcaagttgaggcttcagtaacctgtgatagcaccactgcactccagcctcagcaaaagagcaagaccctgtctcaaaaaaataataataaagtggggaggatggtatgactttgaagatcagagaatactctggaatgctctgtaagtgccaaaagccacgcctggcactgctgaagaaatgttagctattttggaagggaagtcagcacacaaagtgtttgtactgggtttgacaggaggaaaaccagaaacactgcttattttcccg[135 bp omitted]acatggcaaaacccgtccctactaaaaatacaaaaaaattagctgggcgtggtggtgcacacctgtaatcccagctacttgggaggctgaggcagaattgcttgaacccccaaggcagagccgagatcgtgccactgcacttcagcctaggggacagagtgaggctctgtatcaaaaaaaaaaaaaaaaaaattaagaccttgttttacagatgaggaaactgaaggccagagagaggcagtgcctgcaccaggcccacacaggaaggagaagggaagggctgggcagggtgggatgggggagcagggaccaatcccaggtggagcctgaatgaggcagggaagccctcatctcacctccaggcgaggatcaatgtgcagtcggccaggatacacatcttagccagctccttgagggcctgctggggatctttctggaggagaaaatcagaattagaaacctagaagccaggaattacaaaaattagccaggcgtggtggcaggtgcctgtaatcccagctactagggaagctgaggtgggggaactgcttgaacccgggaggcagacgttgcagtgagccaagatcgcgccactgcactccaacctgggcgacagggtgagactctgtctcaaaaaaaaaaagaagaacaaaaaaagaattaaagcctgaaaacacagtagctcaggatgccaagagcctctcacccaattgtcactctctaagctcctactgggtgcctggcccgtgctaagcagtgctaggacccagcagtggctgagacagccctgactctgccctcccagggctcacagtctgatgagcaggacagacctgtccccagacactgatgatctggagtggccagggctgcgatgtgggagccagaggagggactgagcctgcctgggggatcagggagggcttcttggaggaggggacattagagctgagacccaaaggaggatgaggaggaggaaaggatgaaaaggagaccagaaaagggaattccagacataaagaacagcatgggcaaaggatgggaggggaaagagggcttgaggaattataattcgctccctacgggagagaggatgtgaaattccatgaggagcatggaatcttagagacgggcctggagaactgggtagaggttggaggtcacacagggccccataggtcatggaagggagcagaactttctcctagggtgcttaggagccatgtgagttttatgatctttttaatttttttcagacggagtctcgctctgttgcccaggctggagtgcagtgacatgatcttggctcattgcaacctccacctcccgggttcaagcaattctcctgcctcagcctcctgagtagctgggactataggtgcccaccaccatattttttgtattttgtagagatgggggtcttcactatgttgcccagactagtctcgaactcttggcctcaagtgatcctcctgcctcagcctctcaaagagctaggattacaggcatgagccactgcacccaacccaatggaagaggaatgcttgaggccaggagttcaagaccagactgggtaacatagcaagaccctgtctctaaaaattaaaaaaaaaaatcacctggtgggggtggctcacacctgtaatcccaacactttaggatcacctgagatcagaagttcaagaccagcctgaccaacatggtgaaaccgcatctctactaaaaatacaaaaaattagccggtcatggtggtacgcacctgtaatcccagctattcaggaggctgagtcaggagaatcacctgaatccaggaggtggaggttgcagtgagccaagattgcaccactacactccagtctgggcgaaagagcgagactctgtctcaaaacaatcaatcaatcaatcaatcaataaaaattagcaaggcatggtgtcatcccagttgctcgagaggctgaggcaggagaatcgtttgaacccaggaggcagaggttgcagtgggctaagatctggccattgcactccagcctgggcgacagaggagactccgtcttaaaaaaataaaagagagagatatggccaggcacggtggctcatgcctgtaatcccagcctttgggaggctgaggtgggtggatcacctgaggtcaggagttcaagaccagcctggccaacatggtgaaaaccagtctctactaaaaatacaaaaatcagccgggcgtggtggtgcatgcctataatcccagctactcagaaggctgaggcaggagaatcgcttgaaccccagaggtgaaggctgcagtgagccaagatcaagtcattgcactccagcctgggcaacaagagcgaaactccgtctcaaacaaacaaacaaacaaacacaaaacaaaaagaagagatatttaggtggcagagatctgggactaattgaaggggatgtggggaaagaggaaatagacaattttgccctcccctctccttgccaacataatgtcttggtgacccatgtcatctcagatgtgaaaaacgttcctcgctgaggttttagctgcatttcctcttggaagggattcaacagcccactgcacaacctcaaagcccggtgaggctggctagggagcagcccctgcttaccacatccacctggacaagcaggacccgcaaggcgaagttcttccccaggctctgcagccgcccatggatgtagtctgggtgcaggttgtggtagcggaggctggtgggggcagggagcgggagttgagaggtctcagtctcttcaagacccccaaagcccttttccctctcactggaatactaagggctcagagtacggcatgggggacagagggtcctgaggcccacagagggtaagtcacttgccccaggtcactcttccaagaagatgctccgcagggattggcagccagggccacatggctgtgcttacctagaagaccagacccctggcttcttcatgaagaggggaagagacttgggcttcaaggggagaacaggtgccaggggccctagagagtgtgggcacggggacactgcatggctcgcggtgggaagcagggcccactgccaaaccatctgctctggccttggagggctacggtgagggcttcatgacccagggaactaggactggctctgcccagcagtctgcagctgtcacagcctgcagggagcacaggaactcagaggtttcacttcctctgtctggccctgtctgcagaggggcccctaggttggaggggaaagttgtttaactagggtagagatgggagaaatcctgcttctcatcaactccagtcaaggatgtctgggacatgagtgacccagtccctcctccgtcagatccaggagtctgggcccagcccctcctcccttagacccaggaatctggccccagcccctcctcccttagacccaggagtccaggcccccagcccctcctccctgagaccccaggagtccaggcccccagcccctcctccctgagaccccaggagtccaggcccccagcccctcctgcctcagacccaggagtctaggccccagcccctcctccctcagatccccaggagtccagccctcagcccctcctcccccggacccaggagtccggcccccagcccctccttcctgagacccaggagttcgggctccagctcttgttgcactgggcacctccaggccaagaccccctgcctccaacacagggtcccaccaaggcccagaacctgcaggaccatgcccagaggcttctcatagaacagtccagaacactgggacatgaccctcccaggccagtggggtgcccttcctgaagtctggggtggcgccgcagagctcacctgaggaacagggcacaggtgctctggcccagcacatagtcgggaattacgtcgccaaattcccagggcacattgcgcacgaacttcagtacgggattgcccctctggggagggacgaagggcagaagccatcaatagggatgacccttgataaccacagggccctcctccacctcttcttgcacctcctccctcctcccacctcttcccacacctcctgcctcctcgcacctcttcccacacctcctccctcctcccacctgtggcagggtcttttccagcttctctctcctcctaaccctggacagtccctgatcctctgatccaggctcctcccctccatgcccactggcaccaggcctttcctaaagggtccccgggtctgtctccagctcagccctctccctccagccccagtctgcgtgtcctgtggtcctgaacacttcctgccctcacgcccagcaactttttgtgtttttagtagagatggggtgtcaccatattcgccagactggtctcgaactcctgacctcaggtgatccacctgcctcagcctctccaaagtgctgggattacaggtgtgagccaccacacccagcctcattcagtacattttgaataaattaacaaacctggggtgaggaaacagagctacaccaatacagccacagccccagcaagtagagctggggcactctcaacccacacactgctgtcgaatgaatgaatgaatgaatgaatgaatggggagaacaaagtggctggaactcagacctccttgcactggagtcatccctagaacagcgtttcccactgaaaacctcaaggcctcacttctccgtctccctcctcacctgccgagggctcacaatgatgctgttggattttgccccgggtttcagggcctggttgggcgtctctcctgccaggggctctgaccctgtggggcacgtggccccagccccttccagaggctgtgagatggcatattcggcgtaggtctgaggggccgcctgggccgaggtgtccacagtgggaaggctctgtgtagatcggaataagggcttggcctgtggggagaaagggagtttgcaggggactggttggggtgagcagaggacatctgaggccctgtgagttcctctcccctttctttttctttttttgagacagtcttgctctgtcacccagactggagtgtagtggcactatcttggctcattgcaacctccacctcccgggttcaagcaattctgcctcagcttcccaagtagctgggattacaggtgcccaccaccacgcccagctaattttttttttttttttttgagatggagtcttgctctgtcacccaggctggagtgcagtggcgtgatctcggctcactgcaacctccgccccccaggttcaagcgattctcctgtctcagcctcccaaatagctgggactacaggcgtgtaccaccacgctggctaatttttgtatttttagtagagacagggtttcaacatgttgtccaggctgatctcgaactcctgacctcaggtgatccgcccgcctcggcctcccaaagtcctgggattacaggtgtgagccacagcacttgacccctctcccctcttcagggctgcccatcctccttcctcctaatgtcccttccagaaggctgagagctcaaaatctgaattcagccacttctcccccactcctcagcctccactctggtcccagccaccagcgtttcacccttggaccactgaagtcacttcctcaccagctccttgcccacaccctcgccccctggaagtctgtcccctaactaagtcctcatgtccctcctctgctcagagctggtgggtggctcctgcctcagagtgaaagccaaagctgtcaccatcacccacaaggctctagatctgtccctgctccttgcctcagaaactacaccttctaccacttctccttgctttctctactccagccccaccagacttcgttctgcccttgaacacggcaggctctctctgacctcagggctttggcactggctgttccctctaccccagatgtcgccatggctcactccctcacctctttcacgtctctaccaagatgtcacctcctcagagaggccctcccttgaccttcctatctaaagtaggaaggggccaggcatggtggctcatgcctgtacatcccagcactttgggaggccgaggtgggcggatcacttgaggttcgagaccagcctgaccaacatggtgaaacccgtctctactaaaaatacaaaaattagccaggcgcgctcctgtaatcccagttactcgggaggctgaggcaggagaatcgcttgaacccaggaggcagaggttgcagtgagccgagatggtgccagtgcactccagcctgggcaaaagagcgagactctgtctcaaaaaaataaataaataaataaataaatagagtaggaaggtcctctcccccatcatgccctacatccttagcccactttccttttcttcatagccaatgctcatcacccgtcgattgttttcccttgggaaggagatttcaatattgccaggtccttccatttaccaaaatatgtctaaagtgtagatttttttaagattgcaaaacctggcgattcttaaacacgagcaataaattcatgtcttgaaaaatcagggtgctggcctcgtaaaacacatcaggggctacctgctgaatgccagtgtctggcctctgccttagccctctcttagaaccacccatccatttcacagatggggaaactgggacctggggaggaccaaggactgtttccccaagtcgtccgtggcccccaaatccactaacccacaccctggtcccacaggccccatcctatcctcttcgtcctaacagcccccagcctcccaggggccccgcatctccttgtcctaccactccaggagggacctcatcctcgtcgaggggtatcacaaatttcttccttgctggcggccctgagggctggggcaccccctctttgtccttcccagggtccatctggagcctgaaagggaaggtgccaggagcgagtgagccactggcgtctacgttctcatcccgcagcaggaaccccccactcacagccgtcccccacaaaactccgagagctccatagcgtcaggtccccaacacccagcgctagaggctctgtaacgccacgcccctttgacctccaccttcggctcgccccgccccttacaggtccacaagtcccatcgctccgcccctcgcccccaccggattctattggctccgtccccaccatcccccgccttccgttcgtccggcccccgaggctagcatctggacgccctccccacgcctggccttgtccatctctcagactcggcaatgattggcttccgcggcgccaatctccacccgcagtctccgcctcccgcacctgtggtccgggcctcacggtttcagcgccgcgaggcctcacctgctggtcttggagcctcaagggaaagactgcagagggatcgaggcggcccactgccagcacggccagcgtggcccagggctcgcagcacttccggcctctctggccccgctccccaggagagtagagcatagagcagggcgatctctgtacaactctctatggttctggaggaccgcggaggtcgtgggaggagagagatgtggcctgaggatctggctcccaaactgttaagtttcaaagcccttactgagcgcttctgtgtgcccagaatcctggcagggctcagtggagaacagatcgcaggagatccaacttggtccctcctctcagtaaggagagacttaagtttgaatccaactcagacattgacttggcttcagtttcctcattcattcatttattccacacctattccccccacgcgcttcctctcttcccggtcctgtgcgagtccgtgctggtgacacagcagtgaccaacgacagccccgtgttgtcctcccggagcttacggttcagtaagggacacagacacgttcccagtgctgacccagaatgggcaggtctgggatgggagatcccgggagagccgtgggatgggggtcagggggagcgcctgactcagccccggagtccggaagggcttcctggaggaagggacatctgagcaggggcctggctgatgagttagtattagtcacttcctgaaaggatagtatcacactgttctaacttgcagctctctgattactaaggaaatggaatgttttttgtgaaagtattggtcttgtaaattttgtcttctgtgaattgcttgctcatattccttgtccatttttaaaatgggttgtatggcttttttattactattaatttctaggggtactttatggattctgattctaatccttagttacccatattgcaaacatttcctcctagtttctactttgggctttaactttagttatttttggcacagaagttatttgtgtttatgcgcaactatttatcaatctgttccgttctgacttttgcttttggtgtgttaagagccctgccataacccagggtcataatgataaattcttttttttcttttttttttttttttcgagacggagtttcgctcttattacccaggctggagtgcaatggcgcgatctcagttcactgcacctccccctcccgggttcaagcgattctcctgcctccttagtagct[137 bp omitted]ctttgtgacctcccaaagtgctgggattacagtgcacggctataatgatatattctatcatttcttttatctacgtaaaagataaaagccccgtgttgtcctcccagagcttacagttcagtgagggacacagacacggtcccaaacagtaatgacctagaatgagcaggtcatctggctttaatctatgtaagatttatttatttatttattattttttgagatggagttttgctcttgttgcctaggctggagtgcaatggagcaatctaggctcactgcaacctccgccacccacattcaagcagttctcctgcctcagcctcccaagtagctgggattacaggctaacttttgtatttttagtagagacggagtttcaccatgttggccctgctggtctcgaactcttgacctcaagtgatctgcccacctcagcctcccaaagtgctgggattacaagcatgagccacggtgcctggccaagatttatttttgaaagtgcaccgaggtcgttgtttatgagtgatgtaaccaattgtctcaagttgaccaaaggtagatcttttctccactgttctgaaattctacctttatcacataccaaattcccatacacacacgtctatttctgacatttctgttatgttcattgatctttttatttattcttgcctgcatgtacatgacatccctctgtttctttgttcacatcagtctttcatctatgggtgtctatctgtgtctacattttcccattttacttaattttttttttctgggcatggtggctaatgtctgtaatcctagcactttgggaggcctaggcgggtggatcacctgaggtcaggagttcgagaccagcctgaccaacatggagaaatcctatctctattaaaaatacaaaattagagtcccggtgcagtggctcacacctgtaatcccagcactttgggaggccgagacaggcggatcacgaggtcaggagttcaagaccagcctggccaatatggtgaaaccccgtctttactaaaaatactaaaattagttgggcgtggtagcgcacacctgtagtcccagctactcaggaggctgaggcagaagaatcgcttgaacctgggaggcggaggc[135 bp omitted]gaggcaggagaattgcttgaaccctggaggcaaaggttgcggtgagctgagatcgcaccattgcactccagcctgggcaacaagagtgaaactccatctcaaaaaaaaaaaaaaaattttttttgagacaaggtcttgatctattgcccagatttattgtcctgaaccttgcttacctcaaatgcctttttcttttcaccctaacaattgaaatccagaattctaggctgggtgcggtggctcatgcctataatcccaacaatttaggaggccaaggtgggcagattgcttgggctccagagttcaagaccagccagggcaacatgacaaaaccccatctctacaaaaaaacacaaaaattggctgggcaaggtagctcatgcctgtaatcccagcactttggaaagctgaggcaggagaatcacttgaacccgggaggtggaagttgtagtgagccaagatcacgcaattgtactccagcctgggcgacaaaagcgaaactccatctaaaaaaaaaaaaaaaaaaaaaaagctatgtgtgttggtgtgcacctgtagtcccagatactcaggaggctgaggagggagaattgcttgagcccaggaggcagaggctgcagtgagctgcgattgtgccactgcactccagcctgggtgacagagtgagaccaaaaacaaacaaaacaaaacaaacaaacaaacaaaaaaacgaaagaaaagaaaggaaagaaaaaggaaatccagaatcctaggttcttagtattgtttcttgcaatgttagaagatataggggccaggagaggtggctcacgcctagtaggaaggaaggagaatcagtctaatagtctcatcactaggtataattttcccccaggaggccgggcacagtggctcacgcctgtaatctcggcactttgggaggccgatggaaggtggatcacgaggtcaggagttcaaaaccagcctggccaagatgatgaaaccttgtctctactaaaaaatacaaaaaaaaaattagccgggcgtggtggcggacgcctgtaatcccagctactcgggaggctgagacggagaattgcttgaacccaggaggcggaggttgcagtgagccgagattacaccactgcactctagcctgggcgacagagcgagactccgtctcaaaaaacgaaaaaaagaaaaaatgaaatatgcctctgtatccaagaccatacagcgattctagaagtaggtcatcccaagtagaagggcttgtgactcagttatccccttggggaatggaattgccagacttaaccctgcaactcctgcgttttctgcaagggggcgatggtgcaccacaagaggattggaagtgttggggagccggggcctctctgctccgccagaacccagcgggggcaggaccccctagaaggcggcccattccccgctcccgattcatttccttgaagcagaagtgcggtaaagggcccgccgcctgcgatcagtggaattctgaatcggttaacgttagttaagagcgaggggaaaaaattgccctgggttctacgttatttccaagttggcaagttggatgttggatttctaccctcagtttcttttctttttttctttttctttctttctttcttttttttttttttttttgagacggagtctctctctgtcacccagactagagtgcggtggtgcgatcacacctcactgcagcctcaacctcccgggctcagatgatcctcccacatcagcttaccgagtagctggaccacaggcgcgcgccaccacgcctggccaacttttgtattttttttgtagaggcgtgggggtgggggggtggggtctcactatagcccaggctggtctcgaactcctgggctcaagcgatcctcccttctcgccctcccaaagtgtcgggattactgtagtgagccactgctcccagcctaagctgtttcaaaactaaactttggaatcccggattcgaatctccccggctcccagagttgcgcgttcgaatcccccagccgtatccaagctccgattccgcctctttcttccaaacgccccaagttccagaattcagccgcaactccagtttgggccactccccagctacggcccctgctcccatcccaaaccttcccctcctctcaacttcgagccctttgttcgccccggaacgggtggggtggggacggagactgtaaggacgggaccctcaccgacaattccgccaaaggggacctgaacggggggcggagagcagcccggccgaaggctctggaagcgggcaccgccggggggcgcagtgaccaggctggcgtccccgcccgcctctaaacttagccgcggtgacgcgcggcccggcgatcgcggcggggccggggacgcaggggggcccgagtggaggggggcggctcggctcggcgagcctctatttatagcgcccggagcccgaaatagcgcggagcggagcggccgggatgacgcgggagccgccgggggctgactcacccggccccaagcggaggcccccggatggggggcagtggaggcgcctagcccctactccgcgtcctcccgggcaccttttttggtgggacatcccaagtctccgctggagaggctgtggatggatgtacagcaaaggaaagatctgcagcatgagagactgaggttggatcagaagtgggacttccacacacacaaaaaaccccagaactgggccgggcgcggtggctcccgcctgtaatctcagcactttgagaagccgaggagggcagatcacctgaggtcaggagattgagaccagcctggccagcatgatgaaacctcatctctactaaaaacacaaaattagccaggcgtggtggctcatgcctataatcccagctactcgggaggctgaggcaggagaatcgcttgaacctgggagacagaggttgtagtgagccaagatcgcgccactgcactccagtctgggcaaaaacagcgaaactccatctcaaaaaaagaaagaaagaaggaaagaaaaataaagacagaatggaggacctatttatacaaaatgagaaaggcggaaagaggggaggtgaaccagatatacacacttgtttctcaccagcaagagaactgggatgttctggaggcaaaggaatggactcagggaccctgggtagttgccattccagagcacatgccattctccacttgtcacgatttcttgcatactgttcccattccctagaatgttcttccttgccttctcagccttgagaactcatgtacctccaggacctggtgcccagggcaattcctttatttttattattatcattattattatttgagacagagtctcgctctgtcacccaggctgtagtgcagtggcatgatcacgattcactgcaacttccgcctcccaggttcaagtgattctcctgcctcagcctcctgagtagctgggactacaggcgcatgccaccacacccagctaattttttatttttagtagagatggggtttcaccatgttggccaggctggtttcgaactcctgacctcaggtgatccacccgcctcggcctcccaaagtgatgggattacaggcatgagccaccgcgtccagccggagcaattcctcaaataaaaactccgtgacccactgaactgggagccccataagggcagggtcaaggccatctcagtcatcgccttgtccccagcgctgcccagcacaggacaggccttgggataaattaactgcatgaataaaaggtgctggtgataaaataaaatgacatttcccgttataatagcaaatgttgattgcatgctctgtgaccggcacgcatgattctgagccttatctcctgtgggcctcgctgcagccctgcagggatgtacttttattattattatcaccgccatccctatgttagagatgaagacaccaggcccaaaggggctaaaagtactggatctcactgcttgcactcagagctttctcttaaacctaggtcaccttggctccaaaggtgttcggtttccagcatacatacatctgggtcctgtggaaccaaaagctagggagtgagtctcagcctgcagcccaaagaaccttagggggttccccagcacccctttgggggtctacaaatacaaaattattatcataagcggggcgcggtggctcatgcctgtaatcccagcactttgggaggctgaggcatcaggcggatcacgtgaggtcaggagtttgagaccagcctggcaaacatggcaaaaccccaactctactaaaaatacaaaaaattagcagggcatggtggtgggtgcctgtgattccagctacttgggaggccgaggtgggagaattgggagatgaagtttgcagtgagctgagattgggccactgcactccagcctgggcaacagagcaagacctcgtctcaaaaaaaaattaccataataatattgacataatatatgatacaccataataataatacttagttggggggtggggtctcagccttccccaggctggagtgcagtggcacgatcttggcttactgcaacctccacctcccgtgttcaagcgattctcccgcctcagcctcccaagtagctgagactatagtcatgcaccaccatgcccggctaatttttttgtatttttagtagaaacggggtttcaccatatcagccagtgcagtttccatgatattgcaacagaccaaatgcagacacacacgtgaggacccagctgtcttctgttaagcctgacgtgaaagtgatttgcaaaaattaaaacaatgcccttcctctcactaagtttttgtttcaggctgtgcatggtggtacatccctgtaattccaggactttgggaggtcaaggtgggagaatggcttaagcccaggagttcaagaccagcctggagggccgggagcagtggctcatgcctgtaatcccagcactttgggagactgaggcggtggatcacctgaggtcaggaattcaagaccagcctgaccaacacggagaaacccatctctactaaaaatacaaaaattagctgggcgtggtggcacacgcctgtaatcccagctacttgggaggctaaggcaggagaatcacttgaacccaggaggtggaggctgcaatgagccaagatcatgccattgcactccagcctgagcaacaagagtgaaactccatctcaaaaaaaaaaaaaaccagcctgggcaacttaggaagacccctatctctacaaaaaatgttaaaatgagctgtgcttggtggcgcgtgcctacgttctcagctgcttgggaggttgaggtgggaggatcacttgagcctagcaggtggaggctgcagtgagtcttaattatacccctggcaccccagcctggacaacagactgagaccctgcctcaaaaaaatttttttttattttggaaaacatggttattttcatgtaaaagatataacttacattaacattcaattaattttttatttttttatttttttgagatggaatctcgctctgtcgcccagcctggagtgcaatggcgcaatcttggctcgctgcaacctccgcctcccgggttcaagcaattctcctgcctcagcctcccgagtagctgggactacaggcatgtgccgccacaccgggctaatttttcatattttagtagtgacggtgtttcaccatgttagccaggctgctctcgatctcctgacctcatgatccacccgccttggcctcccaaagtgctgggattacaggcatgagccaccacgcctggccaacacaaaattaatttattattattattattattattattattattagttatttttagagatgggggtcttgttgcgctgcccaggctggtctcaaactcaagcgatacttccaccccagcctcccaagtagctaggattacaggtttacaccactgcacccagctacttttaaatgaatcaacaaatatttctaaaatttctcagttttgatttccattacagtaaatattgatagaaatcatacacatcaacaaaaactctttggggtcctcaatacattttttaaattttagacagggtttcactctgttgcccaggctggagttcaatggtgcagtcataactcactgcacgctttgaactgggctaaagcagtcctcccacctcagcctcccaaatagctaggactacaggtgcatgccaccactcctggctgcttttatttatttttgtagagacggggtcttgctatgttgcccaggcagaggccttcaataattaggagtgtaagggggccaggtggagtggctcacgcctgtattcccagcactttgggaggccgaggtgggcggatcacgtgaggttgggagttcgagaccagcctgaccaacatgacctgaccaacatggataaaccctgtctctactaaaaatacaaaattagccgggcatggtggcacatgcctctaatcccacctactcgggaggctgaggcaggagaatcgcttgaacctgggaggcggagtttgcggtgagccgagatcgcgccactgcactccagcctgggcaacaagaatgaaactctgtctcaaaataaataaataaataaatggattaggccgggtgcggtggctcacacctgtaatcccagcactttgggagaacaaggcaggcagatcacttgaggtcaggagtttgagaccggcctgggcaacgtggtgaaaccctgtctctactaaaattacaaaaattaagccgggcacaatgcctcatgcctgtaatcccagcactttgggagacca[134 bp omitted]aaggcacgagaatcgcttgaacctgggaggtggaggttgcagtgagccgagattgcgccattgtactccagcctgggtaacagagtgagagtccatctcaaaaacaaacaaattagccaggcatggtggtgcacggatgtaatcccagctacttaggacgctgaggccagagaattgcttgaacccgggagacagaggttgcagtgagccgaaattgtaccactgcacaccagcctgggtgacagagcaagactctgtctttaaaaaaaaaaaaaaaagaatcaatgaactaacaatcatacaaacctgattagtgtcatgaaggacaagaatgtggaacatcattttaactttgaaggagaggacgagtggatgggagggtagcggaggtttctctgtcaaaggagcatttaaggagagacctggctgggcacagtggctcacacctgtaatcccagcactttgggaggccaaggtgggtggatcacgtgaggtcaggagttcgagaccatcctggctaacatggtgaaaccccgtctctactaaaaatacacgcacacaaaaattagtcaggcatggtggcatgcgcctgtagtcccagctactcgggaggaggctgaggcaggagaatcacttgaacccgagaggcagaggttgcagtgagccgagattgtgccactgcactccagcctggccaacagcaagaatgtctcacacacacacacacacaaaaaaaaaaaaaaaaaaaaagaggaagaagaagaagagacctgtccatgtgccctggctcacacctgtaatcccagcactttgggaagctaaggctggcagatcgcttgagcccaggagtttgagaccagcctgggcaacatggtgaaacaccgtgtctctccaaaaaatacaaaaaaaaaaaaaatcgcatggcttggtggcatgtgcctgtagtcccacgtactcgggaggctaaggtgggaggatcacttgagcccaaaaatgtcaaggctgcagagggccatgatcatgacaatgcactccagcctgggcaactgagtaaagccctatctcaaaaaaaagaaaagagaatctatctggcagttttctctcttgccttccaatcgttgcatctcatttatttttcttgtcttacagcatttttttgtttttgcttttgttttccgagactgagtcttgctctgtcacccaggctggagtgcagtggtacgacctcagctcactgcaaccttcgcctcccgggttcaagcaattctcctgcctcagcctcccgagcagctgggactacaggcgaacattgccacacccggccttttttaaaaatttttttatttttatttttattgttttttttgagacagagtttcgctcttgttgcccaggctggagtgcaatagtgcgatcttggctcactgcaacctctgcctcctgggttcaagcgattctgctgtctcagcctcctgagtagctgggattacaggcatgcaccaccacgcccggctaattttttgtatttttttttttagtagagatggggtttttccacgttggtcgggctggtctcaaactcctgacctcaggtgatccacctgcttcagcctcccaaagtgctgcaattacaggcatgagccatggtgcctggccaaatttttgtatttttagtagagacggggtttccccatgttggccaggctggtctcagactcctgacttcatgatccatccaccttggcctcccaaagtgctgggattacaggcatgagccactgtgccaggcccattttacagcatttcaaacacttccaggactatgccgcacagtaacattgattctcacagcagccctccacactacaaccctctgagatgacttatctcaccatgcccattttacagagggagaaactgaggcacagggaaggtagactcttatccaaggccacatagcaggtaaacaaacaaactaggactccaaccaaaccttgtgctctgtctcagccttaaaagaaaactcaataaacattctggcctttttgtttttgttttgagacctttattctgttacgcaggttggagtgcagtgtggtgatcacagctcactgcagcctcaaactcctaggctcaagcaaacctcctacctcagcctcacaagtagctgggactataggtgtgcaccgccagagctggctatttttgtgtagagatggggtctcgctatgttgcccaggctgctgatctcaaactgctggcctcaagggatcctcctgccttggactcccaaagtgttgggattacaggtgtgagcctccatgttcagtccacattctgtacttttttttttagatggagtctcactctgtcacccagggtggagagcagtggcgcaatcttggctcactgcaacctctgcctcccggattcaagcgattctctcaagtctcag[135 bp omitted]catcctcccaaagtgctgagattacagacatgagccaccgtgcccagcctattttttttaaaacgggaaaaatatctgtaaattgccacagtgacccacggagcctggatgaagagcgggaagcctgaggtctccttcagtctccatcctctctctgagcctcagtttccttccctatgtggaagggttggaaaagatgttctctaaaagcctcagaaactctgccgttagcgtggaggggacagaagctcaaacagattgcattagtttcttaacggctactataaca[145 bp omitted]cctgtctctactaaaaatacaaaaaattagccgggcatggtggcgggcgcctgtagacccagctactcgtgaggctgaggcaggagaatggcgtgaacccaggaggcggagcttgcagtgagccgagatcacgccactgcactccagcctgggtgacagtgagactccgtctcagacaaacaaacaaacaaaaatagttttgtagagatgaagcgggggggcggggtcttgctctattgcctacgctgatctcaaactcctggccttgacattgcaatctgcccgccttggcctcccaaagggctgagattacgagtgtgagccaccctggcctaaacatttaaaacgacatgtgtgacagccaggcatggtagcctgcacttgtaatcccagctccttggaaagctgaggtgggaggaccccgtgagaccaagagttggagatcaacctgggccatacagtgagactccatatatagtggattccaatatagtgagactttaaaatataaaataagggccgggcatagtggctcacgcgtgtaatcccagcactttgggaggccaaggtgggtgaatcacctgaggtcaggagttcgagaccagcctgaccaacatggtgaaaccccatctccactaaaaatacaaaattagccaggcgttgtgacacacgcccgtaatcccagctactcaggaggctgagggaggagaatcgcttgaacccaggaggcagaggttgcagtgagccttgatcacgccactgcacttcggcctgggcgacaggagcaagacttcatctcaaaaaagaaaaagaaaatatatatgtgtgtgtgtatatatatatataataagtaaaaataaaatcgtacatatggatctagcagactcatatacctctggttatatttccaaaggaattgaaatcaggatgtcgaagggttatctacactctcaagttcattgcagcactggtcacaatagccaagatatggagtcaacctaagtgtccatcaagggacataatggataaagcaaatgttgcatatacacacgatggaatactatacagccttgaaaagggaggaaattctgccattcaagacaacatggatggaactggaggacattattctaagtgaaataaaccagacacagaaagacaaacaccacatgatcccacttttatatggaatcttaaaaagtcgagctcatagaaacagtataaaggtggctactagagtccagggaagtgggagagggttgggaaaagagaagatgttgatcaaagggtgcaaagtttcagcgagactggagaaatatatttcagtgatctattgcacagcatggtaaccacagttaatactaatgtattgtgtatttcaaagttgctaaaatagagtttaaattttttaaatttgtaaatattattttttattttttgtcactacgtgttctcatctgattttttttttttttgagacggagtctcgctctgctgcccaggctggagtgcagtggcacaatctcggctcactgcaacctctgcctcctgggttcaagtgattctcctgcctccgcctcccgagtagctgggactacaggcgtgtgagaccacgcccagctaaatttt[169 bp omitted]gtagagatggcatctcactacattgcccagattagtctccaactcctgggctcaagccatcctcctgcttcggcctcccaaactgctggatttataggcgtgagtcaccgcacctggccctgacatcttgatgtcaatttatttgcaatatacacccagaagtgggattgctggatccatatgtgtaattttattttttatgtgtttgtttgtttgtttatttatttattttaagacagtctcactctgtcgcccaggctggagtgcagtggcacaatctcggctcactgcaacctttgcctcccatgctcctgtgatcctcctacctcagccttctgagtagctgggactacaggtgtgcactatcacgcccggctaattatttttatttattattattattattttttaagacagagttttgttctttttgcccaggctggagtgcaatggctggatctcggctcagcgtgacctccgcctccctgggtccagcaattctcctgcctcagcctcccaagtaactgggattataggcatgcgccaccacgcccggctaattttgtatttttagtagagacggggtttctccgtgttggtcaggctggtctcgaaatcccgacctcaagtgatccgccccactcggcctcccgaagtgctgggattacaggtgtgaaccaccgcgcccggcccgaagttattcctcttatctgactgtagtttggtattttttaaccgcatctctctgttcttcctctcccaaccccatctctactaaaaatacaaaattagccagccgttgtggcgcatgcctgtaatcccagctactcgggaggctaaggcag[148 bp omitted]gtgaattccccatttaggaagtgtccaagctcaagttgaaatgatggtacattgcggttcatgctgcaatgcctcaacccagttcctctccggacctcagtttcctcatttataaaatgggtgtggacgacgaggtcagatttaaaaaaataataatagtagttaataataataggccgggtgcagtggctcaggcctttaatcccagcactttgggaggccgaggtagcaggatcgcttgagcccaggagttctagacaatcctggggcaatatagcgagattctatctcaaagaaataatcataatcataataaaaataaatgaatagataagctgagacggactcaggcccagctcctgcctgcgatccctgcgggggccaccagggggcgcggcgcccctgcccaaaactccgccgtcggctctgaaccccggcggacgcgtcccgacgcccctggaagattctgcgccctgccggctcgccggcgcccgggagcccgggaggcgggtgtgcacgcggggtgtccagggcgcccccgatcgaggccccctcgccgtgcctcggggtagggggacggctgtgactcaggcgcgcgctcctccccggggccctcagtggtcgcgagggggcgcgcacggcctcgggaacccgcgcggcgccgcgtccatttttaccccagctccgctaaaaatagttgccgcgctccgagccgagcccgaaatagcggcccccagataaggcaggacgactcagcgcttccggggagcggaagggggagcgcgcggggggagcggtgctgggcgcagcccggccgagcaggcgccgctgtccccagcgcacccccactctgccctggcggtcacactcgcccccgactgcgaccccgccccgccgctagcctggctgccttcctacgtcccccacattgtatcctcatcccctgtcccccatcctcagcttcacctccattcctcatcataactcccccctcccctacacccccagcgatgtcccccactggtactcatccgcatcccccagcctgtcctactcctgtccctatttcccctctccaccctcatcgccaatctcctgtcgtcctgaatctgccccttaccatctctgtcctcaaggccaacctttatgggggcagagcagggcgagaggatcacagggagtcaggagacctgcgggctgagggctgagggctgggggtgaggatctgatttcttggtttgtttctactgtgggcaggggtaggcttagatctgggggttggagcatgggacacttcagtctggcctagtcttcagagctgaggcgaggcatggccagcatcacggctcattctgtgaccagggtcggggctcaggctggggaaggatgaccgtctttgtcaccaaatttgatcactgtgtcaccagagttagggctcagccttgagccgtttctttatttacccacctccactaatattttttatttcagacaaggccttgctctgtcgcccaggctggagtgcagtgttgcccatgctggaatgcagtgctgggatcttagttgactgcagccttgaactcctgggttcaagagatcctcccacctcagccttcctagtagctgggactacaggtgtgcaccagcacacctggctaatttttcatttttttgtagagacagagtctccatgccttgcccgccttgtccaggctggtcttgagctcctggcctcaagctatcctctggcctcctcctaggaaggcactgaaatgacaggcatgagctacagagcccgcctccactaagattctttcctcccttgcaagtcagtgattggacacaacagctccaggccttgggaacagtcagaactctgttccctgggcctaggtcttccctttgcactgagatcatctaagggcctccccatttccatatcctgagattctcagtgcccactccaagcatcagtgtcaggcctcaaggacctacactgcatgttctgggggtttaaagggagcacactgacttccctgagggtgacagaggtcagaatgagtgactaaggtcttgggcctggccctgaccctgcagtgggtgggagagatacccagttgaggcccaggtctccacccaggtagcagggtggatggcgggggggtcatccctgaggtgaaatgtgggtggaagatacctagataagtttcagagtcagtgcagagatggtaatttttaagtaacttctaaaattttcgagtagctgggattacaggcgcctgctaccaagcctggctaatttttgtatttttttgtagagacggggttttactatgttgtccaggctggtctcaaactcctgacctcaagtgatccgcccacctcggcctcccaaagtgccgggattacaggcgtaagccactgcgtccagcctaattttttttttttttttctgagacggagtcttgctctgtcacccaggctggagtgcagtggcgggatctcggctcactgcaacctctgcctcctgggttcaagtggttctcctgcctcagcct[211 bp omitted]tgaaaactgtttagaggccaggtgcggtggctcatgcctgtaatcccacccagcactttgggaggccgaggtgggaggattgcttgagcccaggagttcaagaccagcctcgacattatagtgagatctcatctctgggaaaaaaattttttttaattagccaagtgtggtggcatgcacctgtggtcccacctactcaggaggctgaggtgggtgggaggatcggttgagcccaggaggtggaggttgcagtgaaccgagatggcaccactacactccagcgtgggcaacagagaccctgtctcaaaaaaaaaaaaaagaaaaagaaaaaaagttttggtaactacaaaagggtataccttggaaaagtaaatttccctcccactctgatccccacttctcaatattaactattttttatgtatcttggccagtaggattcactgagctctcacgatgtccctggcctatgcaaagcccatcacagaaatgaagtggctggaatcattcagcactcagtgagtaggccagaccccattgctatgcccattttagagatgggaaaactgaggcttggagaggtgcaaggatgtgtccttttgagggcccggttctgaaggcttttcaaagttgaggcaaggaagtggatgagatcaaagaggcaaggttcaggccaggatacaaatcccagggagggtgacaggggtggggagtcaaggaaggctgcctggaagaagactaagggtagccaggaaggcatcttccagaaccttctgatggagggcttggatggaagtagataactctgtttggcaggctgaggaaccaccagcagcagggcgtggcccctcctcagacccacagcaccccagaggtatgtatagaagaagcaggctgcttaatgacatctcagggacacatctcggtgatagcacagccggcttagttatgacgtctgagtgatttgccaactgccttaagaccagcatccctagtcatgccccgcgggggggatgaagataagaggaagtgacaggccatcgggggaggaaggggagatgcagtcacacacagaccagggactcaggagctgagggatgtgtggtgccctctgcactagggaggggtctcccagctgcctggatgtgagggtccatcttattgatttgtctagtgaaggaggccaggctccaaggaggtatggctgtagtcagtcacactcagtttgggatggggtccgcccaggggctgcaaggatcagtcactgctgtgtccccatcacctaaggcagtaactgggacacagccggcgctccatacatcttactgaatgaatgaatcgaatgaaaagggtcagcaccgtctgggactcagtttaccctcgcggtcattgggctgcttcaaccaaggggatcgctaagaacacccctccccaccttgggtcccagatcccagatcgccagtgagtaagaaaacgggttcgcgccgttggtggactccgcccacttgtgacgtcacgagccgctcccccaggatcccgacccaggcgtctcccttgggatgggggcggagaggaacccgggagtccagactcaggccccgcccccgggagcaggcgggccgggcagggttacacaacccgtcgtcgcgtcccgagggaagtcgccggatgtcctggccgggccggggacaatgggcaaggagggcccctcccgcaggaacctggaagtggcaggggctccccctcttctgattcacccttgtttccggcccggtttagcctccttctccctggggatcctatctcctcccaactctaccctcctgtggccctgcagttcggttctttctccgaaccggcaaacctctctcctctacaccccgtaccccgtcctttcacaccttcccaacgccccccgaaactctctgccctcacactcatcgcttgtaattcccgaatcccctaaacttccagtgtccccggtccttccttcactcatccataccgggcccctcttcccaccccctcaactacccccactatcctgcccaggccctcccaatcccctccccgggctcccccaagctttcctcaatatctcccagccctccctagcccccgactcacccgcttccctccaactgaccccaatacactctcttgtcctcctaatcccagcctcccgcagttccctcctgtctcctcgaactgccccatgtccctacctcatctccccaaatcctgttccccatttccccccctcccccagccagccgcttcgccccccaccccggagcccctccccgcccctaggcccaaggccggcccgcgcccctcccgggcgcgctcccacgcccggcgcgggttcccaggccgcccccccgcggtggcccagagacccagtttgctgcggcaaaacactggtctccaggcaacaggccccgccccgccccagggccgccagatgaggctgggcggtcaggaggccaccgggccgggacggagcacccaggcctgcgcgccaaaccctcggccttggcccccagaggcctcagggcgcagaaacccggagactgaggcgcagcaaagaggagatacagagatcagggccccggagcaagaaattcggagacatgcgtggaggccgaagcaacagggaactgtcggggcgcagagatataaggaaagaccacgcgacagatcgaacaaggacggggcccagaaataagcacagaaataatgcagttacacacgggcaacaccgaggccggcagggacgcccctgatggcagaataatccatctttagtcctcaggacctttgcactcagttcgagggacttcccctctctgactctgtttctgtatttgtaaaatggggacattaatacgcagcgcttagcaaatcaggctgttctgacgattcagtgaattcgcagacccagagcttgtagcacaattcctggcatgtacactcatcattcattcattcaaccgattttttgttgttgttgttattgttgtctgagaggagtttcgctctgtggcccaggctggagtgcaatggtaccatctgggctcactgcaacctccgcctcctgagttcaagcaattctcctgcctcagcctcccaggtagctaggattacaagcctgtgcctccacgcccagctatttcttgtatttttagtagagacacggtttcaccatgttggccaggctggtctgaactcctgacctcaagtgatccacccaccttggccacccaaagtgctgggattagaggtgtgagccacggcacctgccccaatcaacaggtatttattgagcatctactatacgccaggcactggtaaagactgtgagaatgcagtattgaacaagacaaagctctctgttctggaagcttactctttggaaattggaagggggatgaccaacaataaatgaacaaatgagcaaattaagcaaattatatagtactttggaaagtagtaagtgctgggaaaagcagagacagggggttgggggttgctattttaaatgggatggtcagggaaggcctaaatgagaaggtgatgtttgagcaaagactagaagttggtttgggagaagccatgcagatatgtggcctaagcaagtgcaaagggtgtaaggtgaagacatgtctggtgtgttggaggaacacggaggcagctagtgtgggtggacagagagaacgtggggagggcactggagcagaagaggtcagagagactaagggctgatcccgcagggcccgatgggctgaggtgaagtcttttacagagtgggtcaggagctatgggagggttttgagcaaaagagggatgtgaactgtttcttatttgttaattaatttatttatttatttattttgagacagagtttctttcttgctgcccaagctggagtgcaatggcgtggtctcggctcactgcaacctccgcctcctgggttcaagcgattctcctgcctcagcctcccaagtagctaggattacaggctcgtgccaccacgcctggctaattttttttttgcatttttatagagatgaggtttcactcaacccaatgttggccaggctggtctcgaactcctgacctcaggtgatttgcccacctcagcctcccaaagtgttgggattacaggcgtgagccaccgcgcctggcttgttttttattttaacagggtcctttgggttgtaggtggggaatagactttggaggacaagtgtggagtcagggagaccagtcactgtcatggtccagttgagtccaatggtgacttggactaggaggtagtagggatcgattctggaggcctttgagttaagagaggcaaaatttgctgacaagcacattcatagcaagccatcagtagatggcagcactttccattatgttaggtggtactcaccacatccccataaaagttaacatccctattttacagatgtgcaaactgaggcccaaagaggtcgcttaacttgcctaaggtctcacggctcagtctagctccaaagatggtacccctctattgggacggctattcccaagcccacacacccgaacataacactctcagtgcctagatttacatctaaacctgtactcatccatgtgggccccaggactcccggagccatgtcctcatcagtcacatggagccggtgtagaaagtaggagctgggccgggagaggtggctcacaactgtaatcccggaactttgggaggccaaggcgggcagatcacgaggtcaggaattcgagaccagcctgaccaacatggtgaaacctcatctctactaaaaatacaaaaattagctgagcgcagtggcaggcgcctgtaatctcagctactcaggaggctgaggcaggagaatcatttgaacccgggaggtggaggttgcagtgagccaagaacgcgccattgcactccagcctgggtgacagggtgagactctgtctaaaaaaaaagaaaagaaaagaaagtaggagccagatggggagaatgctggcccaggacacttgcttagaggcaggttggcacaggcacagagggtccacccagaacctcccagcccagcatctggctcccacatccaatcacggcctaggcctggcacaccccagcactacgtgcagcaacatgtgaaacacagtcacgcatacacacggaaatgtggccttct[131 bp omitted]tgcaacgtctccctttcaggttcaagcgattctcctgcctcagcctcctgagtagctggaactacaggcacgtgccaccacacccagctaattttgtatttttagtagagacagggtttcaccatgtcggtcaggctggtcttgaactcctgacctcaggtggtccacctgcctccgcctcccaaagtgatgggattacaggcgtgaaccactgtgccgggcgtctatctctttatgtctctgtatctctctgttttcttttcttgtctctatctctgacctttgtctcactctgacccagctctgtctctctcacgcctccacactcaggatcctctaactgccgcagaatgactcttgtccctggctgtgtgtttccataggacctcacctattatgtaccatgagaacctggcctctggacaggtgtgtccagccccaggtcggcaattctggctggttgctcagaatcacctggggagtaactcacatagcataattctctgggcttctttctctgagatttttttttttttttgagatagtatcttgctctgtcacccaggctggagtgcagtggcacaatctcagttcactgcaacctctgcctcccaggttcaagtgattctcctgcctcagtctcccaagtagctgggactacaggtgtatgccaccaagcctggctaatttttgtatttttagtagagacggggtttcgccatgctggccatgctggtctcaaactcctaacctcaggtgatccacccacctcggcctcccaaagtgttgggattacaggcataagccatcgcgcccggtcgtctttctctgagattctgacccacagcttgtgggtgtggaactggaggaacccacctttaaaatactccccagtgactgggacccctgcctgcttgtactagttactgcatctgattttacagacagagaagagtcaaggcccagagagcagacagctcaccccaacatcacacagcagtcagctgcgaggggcttggtgctactcagatttctcctaagaatgtttggaaacaacctgagggagagttaagtaataaaggaaaatcacaaacagagacagagacccagaaagggactcacgggaataaaagcagaaagtgacagagatacatagagatgatgagacagagacagagagatcagagatagggttcagaaaaaaagaagagagaggctgggcacagttgctcacgccagtaatcccagcactttgagaggcggagatgggaggatctcttgagcccaggagtttgagaccagcctggacagcatagtaagaccccatctttatttaaaaaaaagtttttattaatttaaaaaaaatgcagagagagataaacacacatcagaggctgagaaagacaaaaagctatttgggggcctagaaagaccccccaccccgccccaggagagatgtattttcttttgaaggagacaataccgtctccttggcccatgctttaataggccctacttcccagaaacagccagtgccatggtttagcaatctcagccttaccaagccaggtctcctccccaggcttgatatgtaggatgcacattaaatacgtttatataacctgccctctgtgcagaatcaaggagctttacataacgtagccctgtgagtcatgcggcagacacggggcactgacctgacatgcccagtgagaggggacccctcgcccaggacctttacctggaagtgattgtgaaggataagggatcatgcatttcactgaagaggaagcagagggttagagaaggcaaggcacttacttggggtcacacagccaggattcagcacagcaaggattccaaccacatctgctagtgccttatcacgtgatcctttacagagtggaggaaacaataataaaaacacctctagtaatacaacgactgctgtgtattgagtgcaccgggctgcagtaagtactttacaaacaccgtcttatgtattccaaaacccagtgaggagctggacgctgtggctcacgcctgcaaccccagcactttgggaggccaaggcaggaagattgggtgagcccaggaggagttcgagaccagcctgggcaacataatgagacccccgtctctaaaaacaaaaaataataaaaattaaaaattaaaaaattagccagtgcctatagtcccagctagttggtaggctgaggcgggaggattgcttgagctcaggaagtgaggctgcagtgagctgtgatcataccactgcactctagcctgggcaacagaatgagaccttgtctcaaaaaaaaccaacaaaatggccgggcgcggtgggtcacgcctgtaatcccagcactttaggaggccgaggtgagtggattactggaggtcaggagttcaagaccagcctggccaacatggtgaaacctcgtccctactaaaaatacaaaattagcccagcatggtggcgggtgcctgtaatcccagctactcgggaggctgaggcaggagaatcacttgaacatgggaggcaaaggttgccgtgagccgagatcatgccattgcactccagcctgggcaaaaagagcaaaactccatctcaaacaaaacaaaaaaagcccagcgagttagggacagaatccagttattaaataacataattaaacctattttatacggagcacttattatgtactaagtgctttaccggatttgatggtcacaattctaggggtgggtgatgttatcacctccatttcaggaaggaaggaggctcagaggaagtcacaggtcaaggttccggagtgggtaactaaacccagtccttgctagccctgtatctctatcacctactcccatgcatacaggtccacaagcatgcctatgcacacgtgcaatcaatattgcactaacatctccaaacactctagttgaaatacccagagctcccgccttatatcttttctcttcctcaagaaggctaacccagcctccaatcccctaaaccttcatgagccagggaaggaaccctcttctttccctctaacgcctcagttccgccacgcggccggccgaggtcggcgctgtaaaatgctcctgctcctttaagagaatgaacagtccaggccgggcgcggtggctcacgcctgtaatcccaacactttgggaggcctaggcgggtggatcaactgagttcaggagttcgagaccagactgactaacatggcgaaaccccgtctctactaaaaatacaaaaattggtcgtgatggtgcgcacctgtaatcccaactactgtggaggctgaggcaggagaatcgcttgaacccgggaggcagaggttgcagtgagccgagatcgcgccattgcactccagcctgggccacagagcgaaagcgagactccgtctcaaaaaaaaaaaaaaaaagagagagagaatgaacagtcggccggcgttgcccggcagcgccgcgccggttgccgggcaacgtcaacaaacgacgcggccgccgtctccgtgcgcccgccccccccccccccccccacgcccgcgcagacgcggtgacgcgacggactgtggaacgccgtcgcctagcaacgcgagggctgtttgtcccgggctgggtggcgcggccgcacagggcgcagccaggaccggcccgggcggacagaccggcccgccgggagcccggggcggggggtggaggggattgcggtgatggaagcgggggagaaccgggttcccaaattaccggtttccctttagacagccgccgtctgttgtcgcccgctcctcctgtctgccccgggaccgcctccgctcgggtatctgtccgtctgcgccccctcctccccggcatgtccgtctgtccagcgcctcccgcgctgtggctgtctcatatcccccccaaaccatcacaaccaaaatagggacaagcacacacttcgctggcctgccgtttctgccttggactgccggatttccgggtgcattgttgcggttggggtccccaccaggggagacagacagacaaggggagacaatctgttcacactcaagccacagccccaaagccctcccgttcctttccccgctcccttggggttctcttgcctgtctttctcgagcctctttcaagagacaggcagcccgtggtccttccatcctgtgtccgggaagctgtccacagctgggaggttctaacaactcatccccaacacacactcccaacacccccccatccagtagcttcatgtgaccagggctggggcgaatctccgagcagagagaagaaattgagtgtgtgacagtgtgaatggatgtgactataggtgagcaacagtcggtgacaatgtgcacatctggtatttcctgtgtgagagcaaaactgcaggactcagtgagtggtttctgtggtttgcacttgtgtatctgggtgtatgggagtgtgtagccctgctgactgtgtagatatgaatgtgtgtgcagttgtgagtcttgcatgtggtcatctatgtgaaacaatgcctgtataagtacccatggatgtgcacggttttgcctctagccgtgcatttctggttctgtgtgtgtgtgtttctggttttttcgtttgttttttagagatggggtctggctgtgttgcccaggctagtcttaaactcctgggctcaagcgatccccgccgtctcagcctcccgactagtggggactacaggcaagcgccactacactcggctaattttctggttttttttgtagagacaggatcttgctgtgttgctcaggctggtctccaattcctggccccaagtgatcctcccacctcggccttccaccacagtgctaggattataggcatgagccaccgtgcctagccatgtgtgtttctggatttctgtgtgtaaccatgcaggtacctgcgtttgtgtacagattatttttcagagctccctccacagcattcattgcaatgtctaattatatatttgttcctttgtttactgtccatctcccccactggactgtgcaccctgtgagggcaggacccaaggctgttgtggtcactgccaggtccccagcaccaccctgcacagagaaggtgctcagtaattccttgttgggtaaatgaatcgatgactcttatgtccatgtcgagcacacacatccatgtaaccctgcaagtgattttgtggtactgggtcttctgtgtgtgtctagaagctgcgtgggccatagcacaggagggtctctgtagccatgtagctctaatttttggcaccccccacagtgcagggcacatatcagagcctcatggcacatatcagggccacgtggagtaggaggccaggtgcactggctcacacctgcaatcccagcattttgggaggctaaggcaggaggatcacttgagacctggagttcaagaccagcctgggcaacaaggtgagaccctgtctctacacataatacaaaaattaggccaggcgcagtggctcatgcctgtaatcccagcaatttgggaggccaaggagggtggatcacctgaggtcaggagttcgagaccagcctagccaacatggtgaaaccccatctctactaaaaataaagaaaaaaaagccaggcatggtggtgggtgcctgtaatcccagccacttggaaggctgaagctaaagaattgcttaaacccgggaggtagaggttgcagtgatccaagatcacgtcattgcactccagcctgggcaacaagagtgaaactccgtctcaaacaacaacaacaacaataaaaacaaaacgaaaattagccgggcatggtggtgcacacctggaatcccagctacttggcaggctgtggtgggaggatcatcagagaccaggagatcaaggctgcagtgagctgtgattacaccactgtactccagcctgtacaacagagtgagactttgtctcaaaagaaaaacaaaaaacaaa[134 bp omitted]cctctgcctcccgaattctcctgcctcagcctcccaagtagctgggattacaagtgcctgcaccacgcccagctaatttttgtgtatttttagcagagacgaggtttcaccatgttggcc[133 bp omitted]cactcggtttcctcatctgtcaaatagggagaataatagacccagtttatgggactgttgtgggagagtaaatgagttcatatggaaagcatttagaaaatgcctggcagaaaacaaacatttacaaaatacctgttttgattgttgtcagtattattacttcctctgtgtgtgtccttggatgtgcgtgtgcgtgtctagaatctgggttgcagatgcaggctttagctctgtagtcctgtgttactgggtacccaaatgccctgagtctcactttccttcctataccatgggcatgttccagaccttctccagggccagttgggactcaatgaagctgcatctggaacaccccaatggctacaaggcccagccgtggtctggtttcaggaaaggtaaatgaagggtgaagttgggacgggatggaattgaggttcaaatcactccatgggactgggaaagtgggaagtgaaagagggatgaaagagcgcatttgaagcaggcagactgagggtcagactccagaaaggacttcctcctaggactattttgg[132 bp omitted]aaccccatctctactaaaaatacaaaaattaggtgggcgtggtggcgcgtgcctgtagtcccagatactcaggaggcagaggcaggagaatcacttgaactcgggaggcgggggttgcagtgagccgaaattgcgccactgcactccagcctggtgacagagcaagactccctctcaaaaaaaaaaaaagaaagaaaaacatgagctgtttggagagctgcctggaggaagagaaaccagcctgagtttcacaggctagtggaatttggaggggggcaataatagcaataacaataggccaggcacggtggctcacacctgtaatcccagcactttgggaggccgagaagggtggatcacctgaggtctggagttcgagaccagcctggccagcatggcaaaaccctgtctttactaaaaatacaaaaaaaattaaccaggcttggtggtgtgtgcctgtaattccagctactcgggaggttgaggcaggagaataacttgaacccgggaggtgtgggttgcagtgaaccgagatcatgccactgcactccagcctgggcgacagagtgagactttgtgtcaaaaacaataataataataataataatgcactaggtgcagatactgataaaggctttgtgaggaattttctttctttcttttttcttttttttttgagacagagtctcactctctttcctggctggagtgcagtggcacgatctcggctcactgcaacctccgcctcccgggttcaagcgattctcctgcctcaggctcccaagtggctgggataacaggtgcccaccactacgcccagctaattttttttttttttttagatagggtctggctctggctctgtcatacaggctggagcacagtggcatgatgacaacccactgcagccttgacctcctgggcttaagtgatcctcttgcctcagcctcctgagtagctggggctacaggcttatttttttgtagagatggggtctcactctgttgcccaggctggtctcaaacttctgggctcaagcaatcctcctgccttggcttcccaaagtgctgggtttacaggagtgagccaccatgtctggccatttgaggaaatttttatttttgtctgtcttgtttcctgctctgtccccagcacctagagtgtgtgactgcagtgtgtgtgtgtgtgtgtgtgtgtgtgtgtgtgtgtgtgtaggtgtgctgattaaatatttgaatggctgattgaatgaacgaatgaatgtcatcctacaaccacttgtgagtcctggtcttaggggaaggctgggctggggccctggcctctgggatccctcttgtgccagtcccccagccctgctgttcccacagctctgtgctgaagagggcgtggagggggccagggaagggagtgtcaggcagccagccggctgcctgccctggacagcagcccagagtgtctgcaggagggagagggtagttcaggagcctgagtcaccctgggagaaaccccagccacatacctggccgctgacatcacccggccagggcacccccggcagcctagacaagctgactgaatcacaggcggaattcagccaccccgggcacgtggcctgctgtgaccccccgcaacacccccgagtggccgtctggctgcgggggttgggccgggcacacaggggtcagtgagggggcatggggcctgagtcagggacagggtggctacagccagagaccacccagccacaggcgtccatgtggggcaggaaggagaaagtttgggaaggagagcctgtggggaggccctggcgggtgaggaggaagcacgtgtgggtgtgacggggaggctgcggcttgtgggcagcggctgggcgacccacaggggtgggatggggtctgagtgtttgcgcagagaatcaccaaatcgtaagagacttggtcgtaagagtcagtcaggaggacaatggaatcaccaatgtgcttacacacgcaaaggcacacacgcacactcaacacccggcctggggaggccctgactccacccaccccaggccagcggggcctcactacccataagcctgcaagttccctaagggactgaggcctaagggacagtttcctcatctgttgagtgggggtattaacaagcattattaggccaggcacagtgactcgtgaggcagaggtaggcggatcccttggaggccagaagttcaagaccagcctggacatcatagcaagaccccttctctacaaagaaaaaatttaaaaattagctggatgtggtggtgtgcacctgtagtcccaggtactcaggaggctgtggagggtggattgctggagtgttggagtttgagactgcagtgagctattgattgcaccactgtactccagcctagacaacagaacaagatcctatagcaaaaaaaaaaaaaaaaaaaaatcactattattgtaatagctatgcttacggggaacatactttctgccaggtgctgttctaggcattctacattttttttttttaaataatggagatgacgtctcactatgtttcccaggctggtcttgaactcctgagctcaggctatcctctcgcttttttggtggctggcacgcctgtaatcccgacattttgggaggccaaggtgggtggatcgccggagcccaagagttcgagaccagcctgggaaacatagtgagatgccatctctaccaaaaaatcaaaaaattagctaagcatggtggctcatgcctgtagtcccagctactcaggatgctgaggtgggaggatcacttgaacctgggagatggaagttgcagt[131 bp omitted]atacacggtaagctttctcaagtgactctgttatgattcttagtactaaacatattattttccctttttttgtttctttctttcttttttttttttttttcggtgatggagtctcactctgttgcccaggctggagtgcagtggtgcaatctcggcccactgcaacctccgcctcccaggttcaagcgattctcctgtctcagcctcccaagtagtagggattacaggaccctaccaccatgcccagctaatttttgtatttttagaagagacggggtttcaccatgttggtcaggctggtctcgaactccagaccttaggtgatccacccaccttggcctcccacagtgttgggattacaggcgtgagccaccgtgcctggccaaatacacattatttttatccctaagtccaactaggaaggcctccaaaacagtcaccctcactgccttggtccagttctacttcttacctccctgcagtccttcctgctgcctcttctttggttatatatgtctgtagtagggagagagtgcttcagggactccctcctcattcataactcttcagaactcaatcatgattatctagatccacctccaccaggaagtcctcctggcttactccagcctcactaagcactctcaccacccaatgcctggagtggttgtagtcagtgagtgacacattgcacagtgtgtgccccctggattgggggtgggtgagagacagcccccacagtgagtggcacccctggccagggcctgggacaagtctgtatccaagggtggctctctgcttaggtctgtgtttgtacctgggtgtgtctgtgtctgccctactctgtgcatactcatatatgtgaacccgtgtgtgtgtgtgtagttgtgagtgtgtgtggaagaggctgcatggcagtggaagctaggtgtgtgattcgtgtatctgtgtgcctagagtgccttgttctatagatttggatgccactccaagcaagtcagtgggtctttttgttttttgttttttgagatggaatctcactctgttgcccaggctggagtgcagtggcacgatcttggctcactgcaacctctacctcctgggttcaagtgattctcctgcctcggccccccgagtagctgggattacaggtgcccaccaatacactcagctaatttgttgtatttttagtaaagatggggtt[133 bp omitted]acggtgtgactgtgagtgaaccttcgcacacgtgtctgtacggatatctaagaaattcttcaagtaggccgggcacagtggttcaggcctgtagccttagcactttgggaggcccaggtgagtggatcgcttgagctcaggagttcgagaacagcctgggcaacatagtgagacttcgtatctacaaaaaatatgaaaattagccaggcatgacagtgggcacctgtagtcccagctactacttggggggctgaggcaggaggatcccttgagcctgggaggtggaggctgcagtgagctgagatcgagccactgcactccagcctgggcgacagagggagaccctgtctcaaaaaaaaagaaaagaaaagaaaaaaagaagacattcttcaagtccacaactctgagggtatcactgtgagagcaggggtcctagctctacccatttgtgtgtgtgtggagatgtgtaagtctatgtagacaaaagtgtgtgtcatttactgtgtttggggtgtgaacacctatgtgatgtgtttgcacaactgcacgtgttttgttctgtgtgtgtgatcgtgtgttcaaataagtcatcttgtcgccgggcgtggtcgctcatgcctataatcccagcactttgggaggcctaggcaggaggaccattgagcccaggaggtccagactgcagtgagccgagattgcgccactgcactccagcctgggcgacagcaagaccttgtctcaaaacaaaagcaaaaacaaaaataaacaaatagtcatcaggtgcctgcacagacaaaggtgaaaggtgtctgcctgttgagatctgtggatagggtgtatatatggacatctcagcctgtctacg[137 bp omitted]catggcgaaactccatctcttctaaaaatacaaaaaaattaaccgggcgtggtggcacacgcttgtaatcccagctactcagggaggctgaggcattagaattgcttgaacccaggaggtggaggttgcagtgagccaagattgcgccactggactccagcctgggcaacagaacaagactccgtctcaaaaaaaaaaaaaaaaaaaaaaagaggctcagatatgtttctgtctgagagtctgtcagagtttaggaattagtaaatgaatgaatggtgaagatccatttactcaacaaacatttatttatttatttatttattgagacagagtctcgctctgtcacccaggatggagtgcagtggcgcaatctcggctcactgaagcctctgcctcctgggtttaagagagtcttgtgcctcagccaccaagtagctgggattacaggtgtgtgccactgcgcccagctaatttttgtatatttagtagagatggggtttcaccatgttgcccaggctggtctcgaactcctggcctgaagtgatctgctcacctcagtctcccaatatgctgggattacaggcatgagccaccagtcctgcctcatttattcttatattatattatattgtttttattttaaatttttttgtagtgacagggtcttactatgttgactgggctggcctcaaactggcctcaagtgattctcctgcctcagcctcccaaagtgctgggattacaggcatgagccactgtgcctggcttgaacaaatatttaataaccacctattgggtaccacgtgctatgctggggacaaggcagtgaccgggatggttttggccgagctttcacccagctcacaacccaatgagggagacaaacctatccccagacaatgatgagcccagattggcagagttggagggagggaccccaggagagggggccttgactcagcctggagatcagggagggcttcctggaggagaggttatgggagttaagacttggaggaaaagactatgagccacaggaagcgaagggaagagtgacccaggcagagggaaaagcacctgcaaaggcctgaagtccagggagagaggccaggcatctggaacacaacggggagaggagagacgagactagggcaccctcggagcaggtcgttcagggcctcaggagccatggggaggagtataatgcaggatgcaggggtactgggagggtcaagctaacagtgtccaatctgggttactctgcttccctgaaactccagggacatctcctccaggaagccctagggattgctcagtgtggagcggctcagccacccagtcacactcactattcaatgctgagcactgaggaggcagccgttactaaatcagcctggatttgccctcccagaggtcacagtcacaacagtcaaacacacacctgcacgtgcacactcatgaacgtgcccctcccctcctctggagcctcagaaacccacagaccttgttcctcccagggggtgtccctggggccaaagcttctgcactaccagggggcttgttggaaatgcaaaagatggctgggcacagtggctcacacctgtaatcccagcagtttgggaagctgaggcaggcagatcatttgaggtcaggagttcatttgaggttgggagttcaagaccagcttggccaacatagcgaaactctgtctctactaaaaatacaaaaaaattagccgggcgtggtagcacacgcctgtaatcccagctacttgggaggctgaggcaggagaatcttttgaacccgagaggtgaaggctgcagtgagccaagatggcaccactgcactccag[227 bp omitted]caggaaaattgcttgaacccaggggtgcagaggttgcagtgagccaagatggcaccattgcactccagcctgggcaacaacagtgaaactccgtctcaaaaaacaaaatacaaaaattagccaggcatggtggcacacacctgtaatcccagctactcgggaggctgaggcaggagaatcacttgaacccgggaggcagaggttgcagtgagctgagatcgtgccactgcactcaagcctgtgtaacaagagtgaaattccgtctcaaaataaaataaaataataaaaataaaaagatgaccacagcagatctgctggctctccaggcaattcgtgatcaccacgaattgagaagcgctgctctcaggcttaacccccctgtacctcagtttccttttctgtacaaggagatcaaaacagaatccatgtagaggactgacgtggagtgaggcttaactgagataatgagtgtgaaagtgctaagcacagcttcctaagtgcttgttttcagcagctcctcttcctcttttctatttttttatttttattttttttggggggggaacagggtctcgctctgttgcccaggctggagtatagtggcagagtcatagctcactgcaacctcaatctctcagggctcaagtgatgcccgtgcctcagcctcctgagtggctgggactacaggtgtgtgccaccatgcccagctaatttttaaatttcttgtagaggttgggggtgggtctcactat[138 bp omitted]aaatttcgaagaccgccatcactcaaccttcttgctctacagatgggggaactgaggaacagaggagcagaggtttggccagaggaaggtgggaaggacgtggtgtggctggccttcacagactctgccgggggctgtttacaggatactctgaggaaagccaggatgggcactgatacccacctccaccctgcgggaggcagaaggctaaggctcccccagccgtctcccccaagcagagctgagcccttgggagccagggcagagatgcaaccctctcccccatgctcaggtcctcctcctcctggaagctctccttccaagaggagcctcttattttattttttattattattatttttgagacaaggtctcactttgtcacccaggctggaagtgccgtggcatgatcatggctcactgaagccttgccctccccaagctcaagtgatcctctcacctcagcctcccaaatagctgagactacaggcacacgccaccacccctggctagtttttgtatttttagtagagatggggtcttgccattgtccaggctggtcttgaactcccgggctcaagtgatctgcccaccttggcctcccaaagtgctgggattacaggcatgagacactgagcctggcaaggaatgagccttatggagaagaacttgatttacccactccatgctctgcaggcaggtgtgtcatgtctgtgagtgcaggtgtgtgtgtgtgtgtgtatgtgtgtgtgtgtgtgtctccagggccaatttctcccttaggcccaggggcacagtgcctagggcccatgataaatttaaccgacccacggatatgggtcaggagggtatacatgtataaagttcaggaagactttgttttagtaacaaaacgagcatgtacaatctgtcaggagccttatgatatcttcccaccagtctcatgagtgggcactacatcttgttctcctttgtcgggtagggaaactgaggccccggatgtcctagctcaagttcaccaagctacttggtgatagaagcggaacataagcctaggccacctagcttctgggtctgcgatcgtgtgaggataaatgcccagtgtgttcgtgaacatgagcatccctgtgtgaataaattgacatacataaacccatttaataaatttcaaagccaggcgccgtggcttactcctgcaatctcagcgctctgggaggctgaggtgggaggatcgcttgaagccaggagtttgagatcagcctgcaacaaagtgag[137 bp omitted]agggtgaaaccctttctctactaaaaatagaaaaattagccaggcgtggtggcacatgcctgtaatcccacctactggggaggctgaggccggaaaattgcttgaatctgggaggtagag[132 bp omitted]tgaagcaggaggattacttgaggccaggagttcgaggttacagtgaactatgattgcatcactgcactctagcctggatgacagagcaagatcctatctcaaaataatactaatagttcaaggaacagactttgaagcctgacaccctgcatggtgttattccagctttgctacttacttgctgtgtgactctgggtgaataacttaacctctctgggcttctgtttcccttcctgtaaaatgatcatttgtacctcacaggagtgttgtgagaattaaataagttaatataagctcttgggaagaattagctcttgttatggttgtgtgaagagctttacacgagtccctctgcaggatgcatggttgttggtctgtgtgtgtgtatatatatatatgtgtgtgtgtatgtgtgtatctatgtgtatatgtgtatatgtgtgtgttgctctcttgatctctgagtgttgtgtgtgtgtcaatgtgtgagatcatatatgcacctttagtaaagatctaggggtctctgtgtgttttgggggtctgtacctgtccttggctgtacacctgaaccctacgtcttcttgtgtgtgtagggatgtgtgtcatgtgtgttgataaccatatgacagtgtgtgtttccacatgccagtgtgtgtctgtgaagctgtttctatgtggctgtgggtgattgcccacgcgtgacctggtgagcggctgtgtggaagtctgtgttgcctgtgtcgggtgtggagtctctggccagccagggtaggtctttgcatgtttcctttattccatggaggaggagatgaggggcttggatgagacagaagaatgaggggtcactccctgtctgatgctggggccgagtcactgcctactagtggctgctgtgtcatctcccagtctctgtccctccctcctggctggtggcagacagagggggcgtggaggaacagggcagggggtgggcttgaggctggacttttgtctggaaacttgaacctccacctatgccccccacgtccctctagtcttccacatctccctacaccctccctactattggggcagggaatcaggactccctgaaaattaagaaccatcgccttggctctgccacaggcttgctgtgtagcccggagacaggccctgcccctctctcaacctgtgaaattcaatgttttaaaagtgcttcttcctttgtgcccagggctgggccaggctgtgcactgggagggaagtgctgggttctctgaggtttgtgaaatagctggtagcacccttcccagtgggtgcttaagagttgggggctgtagcatctgaaatacccaagtcagtgcaggcatagtggctcatgcctgtaatcccagcactttgggagaccgaggcaggcggatcacctgaggttgggagttcgaaaccagcctggccaacatggtgaaacccccatctctattaaaaatacaaaagttaggccgggcacagtggcttacgcctgtaatcccagcatttaagaaggccaaggcgggaggatcacctgagtttgggagtttgagagcagcctgaccaatatggagaaactctgtctctactaaaaatacaaaaaaactagccaggcatggtggcacatgcctgtaatcccagctactcgggaggctgaggcaggagaagcacttcaacccgggaggcggaggttgcggtgagccgagatcgtgccattgcactccagcctgggcaacaagagcaaaactctgtctcaaaaaacaaaacagaacaaaacaaaaattagccaggtgtggtggcgcacacctgtaatcccagctactcgggaggctgaggcaggagaatcacttgaacccaggagatgtaggctgcagtgagccgagattgtggcactgcactccagcctgggcaacagagtgagactctgtcaaaaaaaaaaaaaaaaaacgtcagattcatgaaccccatttgctaagaagatttgctcaggtagtcacctgtacccctgtgagccaagattgcaacagtacatgctaagagcagtaagaaggagattgtaaagcttagaaagacctgacaggccaggcgctgtggctcacgcctgtaatctcgacacttcgggaggccgaggcaggcggatcaccaggtcaggagttcaagaccatcctgaccaatatggtgaaaccccgtctgtactaaacatataaaaattagcttgacgtggtggcccgcgcctgtagtccagcaactcgagaggctaaggtgaggcggaggttgcagtgagccgagatcgccactgcactccagcctggcggcagagcaagactccgtctcaaaaaaaaaaaaaaaaaaaaaaaaaaaaagacctgacaagtgaaagctactaatattgccattatcatttaaaaaaaccccagacacaggtttttcagggagtttcatccaaccaggcaggtctcagaaatcagaaaagaaatggaaagggtaggaaatctggagtttgacaattctgagtttgaatttcttgtgatgggatcttgggcaagtcatttaacctccctgagtatcatttttttcttttataaaatgaagatttttctctcttaaccttccagagctgttttaaggattacaaatcttctactgaaaggcgtagcacaggagctgtgcttggcaagtgccaaatacaaggcattaattattattattagaattaataataatatcccctccctcttacacattctttgtctccgggtggattaaaaggtggaaggagaggctaccaacaccatcagaagagaggcttctctctaagtttcatttcccatctcctccaaatccgcatccctcccaaacgccggacctgtaaggccagcagggtccaagacacacatcctttgcccagcggggaagattaaagctaaagctcagagagggaaaacatttcctaagctcgcacagcgaatcaggacagaaaccaggacgagcctcggaatccctccattacctccactttcacctgagcatcacagcccgctcgggactcagtttccccacctacgtgaccacaccacactaatcagggtctccttttggagatctgctcttcttctcgaatgggggcgctgcaccatcggtagaacagggtaggtgggggcgccagaggtgaaggggacctgcaggctggggtcttccccgcccgggtcagcggggtccctgcggggctagtctaagcgcctattattaccagcccccggggcggcgttgcactgcgcaggcgcgggcggggcgcgggcgcgcgcgcgagcgagcgagggattccctctgacgtcattgctaggataccaaacaaacactccgccgcgccggccgagctccttatatggctaattgcgtcacaggaactccgggaaggcggggccgggatcccctcccgccgagtggcccggaacgcaacccccgagacccccagggccccgagggtcatgcaagtgaccagatcgagtctagaacagacctcttgctggacagtgcgggactcgatttggcggggccggagatttggggaagtttgtccagcaaggggcgggtgacgtaagcaggggggcgggtcccgggcatataaatacaggctggcgggtctgtgcttcattcataagactcagagctacggccacggcagggacacgcggaaccaagacttggaaacttgattgttgtggttcttcttgggggttatgaaatttcattaatctttttttttccggggagaaagtttttggaaagattcttccagatatttcttcattttcttttggaggaccgacttactttttttggtcttctttattactcccctccccccgtgggacccgccggacgcgtggaggagaccgtagctgaagctgattctgtacagcgggacagcgctttctgcccctgggggagcaacccctccctcgcccctgggtcctacggagcctgcactttcaagaggtacagcggcatcctgtgggggcctgggcaccgcaggaagactgcacagaaactttgccattgttggaacgggacgttgctccttccccgagcttccccggacagcgtactttgaggactcgctcagctcaccggggactcccacggctcaccccggacttgcaccttacttccccaacccggccatagccttggcttcccggcgacctcagcgtggtcacaggggcccccctgtgcccagggaaatgtttcaggctttccccggagactacgactccggctcccggtgcagctcctcaccctctgccgagtctcaatatctgtcttcggtggactccttcggcagtccacccaccgccgccgcctcccaggtaagtttttgatagtaggggtgctgctttgtaggttttattttttaagtcaagggtgaaaagaataaaccccaacccccacaaaaaggcgcatcagaaccctagatctgagatggaaaaggctcacagcgcactttgcaaactgcaaagagtcgggagatgtttgcaattggttgcgtgcgtggagcgcaaggagggaacgcggcagggagggtaggctttggggcgaggtgggggtggggtgggtaatgcgctgctcaatgcaacgtgtatgcggtagcggggctgagaactttgagccggccccgggactgccccctgctcgggtcccagacctgaagctagcgcagttaggcaggtgggggaaatcccggggaagcttccagcagtctcttttcctttcctcctccttcggagcgcccacttcggtgccgggtcgccctccacccatcgggaagaggggcctcgaaccctcagccgcgctgcctccgcctcctgcgcggagacgtaacgggggacccgtgcgtaacggctgacgcgctggaatcctccgtctgacgcggggcacgcacggcgcgcggcgcccccttcgtccgccccgcccctgacgtcccgggagcgttctattttggaacgccggggccacgttgctaagggagggggcagcccggcgtttcgattggccgccggggcgcacgccttggccaatcagctttcccttcctatttgtagggtgcattttccttcccccctctctgtccccggaacccgtggttccttggcggctgggtctcttttcggcgcctctagaggcagagggaggggatccctgtcgtgacaagagcgcctgtctgcgacccaatggatctgcgaggcccttgcggggatctagtccctgggctctcaggagaagggggtgtctgcttgtgtgctggcgtttcttggagagatacggtggctgtcaccctcttctccaggcacacacagacacattcccactccctctgctcctcatgcccggttcctccggtgtgtcccaagacaggactagaaccgcgaaccgaagggcaaccagccaggtggtctccaggagctccgccccctctgggttcccaggactctgattggtcggcgagccagcccttccctcaccacgccccccgagagagtagttaagccttcagagcagttccaggagtccatttacgggaggggggagatgagcgctgctgaggcttgggggctcaggtcccgcaccattccccctccgcgacaatctgagagagctccagtggttacttttatctacctgtccgttcaccctaaactgtcactcgtcagtctcactctgagaagagacagtaacttgaaacgttgttctaaactcctaggcccgtcccccaaacacccttttgactgggacccccgcccctgcatgggacctcgcgcagaggggggtgtgtatgtgtgtgagtgtagaggaaggcttggcctaaggcctctccttctccctccccttgcctctggggtgggggtggggtgttgtggctgtgtgtgtggctgtggctccgtcccgggggttctgtcacccggctgtgtccagcctcctctccaccccccatacctaagagtcaccaacccggggtgtgattcaccacccgctggaaccgtgcaacctttccccgaggaagaaggaggaggtagaagccagttgagcagaaatcctctcattaaccactgcgtcacggtgtagtggaagggtgggtgttgtggctttttccctgtgacacacacatccacactcgctcaccctgtgctcactcacggggtcggtgtgtgttatgtgtgttgggtgtgtgtgtgtcggtgtctttgtttgtgtgtctacgcctgtgtgtgtatgtgtcaccccgtaggagtgcgccggtctcggggaaatgcccggttccttcgtgcccacggtcaccgcgatcacaaccagccaggacctccagtggcttgtgcaacccaccctcatctcttccatggcccagtcccaggggcagccactggcctcccagcccccggtcgtcgacccctacgacatgccgggaaccagctactccacaccaggcatgagtggctacagcagtggcggagcgagtggcagtggtgggccttccaccagcggaactaccagtgggcctgggcctgcccgcccagcccgagcccggcctaggagaccccgagaggagacggtgagtaagggacatcagaacttggcctgggtagggggaagcaagagaggcaggaagtttcttatgaatggaggggggctccactaaggcctcagtgttacagaaaccccaagatccttgctacacgagcgaggaccggaggcttgttttttggctcttgggggttctgaaagaagtagaggttcgggatgggtggaggagtgctgtatccccaaatctcatggcctctatctccctgactcagctcaccccagaggaagaggagaagcgaagggtgcgccgggaacgaaataaactagcagcagctaaatgcaggaaccggcggagggagctgaccgaccgactccaggcggtgaggacaggccctggggtgggagaggggatgttgaggggagctctctccccattctctgccccctctccacctgtacccttatcctgggttgagaactagacgttccacacatggaactaggtactgctgtggccagactgggtagcccagggcacaaacacagacccccatggacttaagtcaactcctggtcccccccccatttcctgaccccacggactactctcctagccttcatttcatcccaaggggccacatggggcccttgaggagaggggcgcccccatcatttctcccatctggtcttcagcaagtaacaacccattttgcctcagtttctccatctctgcaaaccctcatcaaatctcccgggctctttctacccttaacactctggaaagcctgtgaaatgaaattattccacctcctgccctagccacccacagctctcctggtgctggtggcatcccccaaaacccactcccttcctacgtcctcccttggtctgagagttccctgctgtatgcctgcagggtgagctgttactccttgagggaacaagggaattgtcaactttccttctctactttttctcttccccgggaggtagagagggaggggtaatagaagggaacacattaaaaacacataacagtggctcatgcctgtgatcccagcactttgagaggccaaggcaggaggattgcttgagcccaggagtttgagaccagcctgggaaacatagggaggacttgtctctaccaagaaaaaaaaaaattagttgggcatggtggtgcacaccactgtggtcccagctactatggaggctttagtgggaggatcgcttgagccgaggaggtccaggctgcagtgagccatgattgcactattgcactccagcctgggggacagagcgagactctggctcaaaagcaaaacaaaaccaaccacataacgattgttcattcattcaacaaacctcctgcacaccagaaacttccccataaacctggccccttctgtaccatcctttggacagatgggggaaactgaggttcctggaaggcaagacccttgccccaactcccatggccaccaggactccatctcaggaggtgttttttctcagcccggggctgccttccagcagcaagtccaagggagccatgacccgagtttcccggtcactgacatgcttttttctccttcctctctctcttctgtgacctggcctccctggcctcaggagacagatcagttggaggaagaaaaagcagagctggagtcggagatcgccgagctccaaaaggagaaggaacgtctggagtttgtgctggtggcccacaaaccgggctgcaagatcccctacgaagaggggcccgggccgggcccgctggcggaggtgagagatttgccgggctcagcaccggctaaggaagatggcttcagctggctgctgccgcccccgccaccaccgcccctgcccttccagaccagccaagacgcaccccccaacctgacggcttctctctttacacacagtgaagttcaagtcctcggcgaccccttccccgttgttaacccttcgtacacttcttcgtttgtcctcacctgcccggaggtctccgcgttcgccggcgcccaacgcaccagcggcagtgaccagccttccgatcccctgaactcgccctccctcctcgctctgtgaactctttagacacacaaaacaaacaaacacatgggggagagagacttggaagaggaggaggaggaggagaaggaggagagagaggggaagagacaaagtgggtgtgtggcctccctggctcctccgtctgaccctctgcggccactgcgccactgccatcggacaggaggattccttgtgttttgtcctgcctcttgtttctgtgccccggcgaggccggagagctggtgactttggggacagggggtgggaaggggatggacacccccagctgactgttggctctctgacgtcaacccaagctctggggatgggtggggaggggggcgggtgacgcccaccttcgggcagtcctgtgtgaggattaagggacgggggtgggaggtaggctgtggggtgggctggagtcctctccagagaggctcaacaaggaaaaatgccactccctacccaatgtctcccacacccaccctttttttggggtgcctaggttggtttcccctgcactcccgaccttagcttattgatcccacatttccatggtgtgagatcctctttactctgggcagaagtgagccccccccttaaagggaattcgatgcccccctagaataatctcatccccccacccgacttcttttgaaatgtgaacgtccttccttgactgtctagccactccctcccagaaaaactggctctgattggaatttctggcctcctaaggctccccaccccgaaatcagcccccagccttgtttctgatgacagtgttatcccaagaccctgccccctgccagccgaccctcctggccttcctcgttgggccgctctgatttcaggcagcaggggctgctgtgatgccgtcctgctggagtgatttatactgtgaaatgagttggccagattgtggggtgcagctgggtggggcagcacacctctggggggataatgtccccactcccgaaagcctttcctcggtctcccttccgtccatcccccttcttcctcccctcaacagtgagttagactcaagggggtgacagaaccgagaagggggtgacagtcctccatccacgtggcctctctctctctcctcaggaccctcagccctggcctttttctttaaggtcccccgaccaatccccagcctaggacgccaacttctcccaccccttggcccctcacatcctctccaggaagggagtgaggggctgtgacatttttccggagaagatttcagagctgaggctttggtacccccaaacccccaatatttttggactggcagactcaaggggctggaatctcatgattccatgcccgagtccgcccatccctgaccatggttttggctctcccaccccgccgttccctgcgcttcatctcatgaggatttctttatgaggcaaatttatattttttaatatcggggggtggaccacgccgccctccatccgtgctgcatgaaaaacattccacgtgccccttgtcgcgcgtctcccatcctgatcccagacccattccttagctatttatccctttcctggtttccgaaaggcaattatatctattatgtataagtaaatatattatatatggatgtgtgtgtgtgcgtgcgcgtgagtgtgtgagcgcttctgcagcctcggcctaggtcacgttggccctcaaagcgagccgttgaattggaaactgcttctagaaactctggctcagcctgtctcgggctgacccttttctgatcgtctcggcccctctgattgttcccgatggtctctctccctctgtcttttctcctccgcctgtgtccatctgaccgttttcacttgtctcctttctgactgtccctgccaatgctccagctgtcgtctgactctgggttcgttggggacatgagattttattttttgtgagtgagactgagggatcgtagatttttacaatctgtatctttgacaattctgggtgcgagtgtgagagtgtgagcagggcttgctcctgccaaccacaattcaatgaatccccgacccccctaccccatgctgtacttgtggttctctttttgtattttgcatctgaccccggggggctgggacagattggcaatgggccgtcccctctccccttggttctgcactgttgccaataaaaagctcttaaaaacgcattcgccaggctacagtgtttatttcctcctaacacccattgcctggcttccttttagtaagagaggatgaggttagattgtcgaaggactacacacacacagagatcatacacccatgcacacacacacacagacacacacctatgcaggaactccttctagtcaatgggtctacagcaggataaaaggaaggcagacagtcaggaggacttcctgtactcgcaggcagtgcctcctactagaaaaagtaagtggctacagctgggcgcagtggcttgcgcctgtaatcccagcattttgggaggccaagatgggcggatcacttgaggtcaggagtttgagaccagccttgccaagatggtgaaaccctgtctctacaaaaaatacaaaaattagcctggtgtggtggtgcacacctgtaatcccaggctacttgagaggttgaggcaggagaatcactttaacttaggaggcagaggttgcagtgacacaagattgcaccactgcactccagcctgggtgacaaagtgaaactgtcaaaaaaaaaaaaaaaagtaaggggtcagaaggttagcctgcaggtgtgggatcacagaggtgtcctagtgatggagcttgtatgctctatgggttaaaaacagacgctaaggagataaactatacacagaagaagcttaatgggctgtgcacagtggcttgcacttgcaatcccagctctttcggaggccgaggtaggaggctaggagttcgagaacagcctggggcaacatagtgagacaccccccaccccaacccatctcattatgttgagaaaaaaaaaaaaaagaggatcttgagaaacttgcacagcaaactactaaagaccactcaggctaggaatgaggcgtcatcttggattttttacaaactacaactacaaaaaacaattattttacactgaagatgtgtttccttttgttttccatatgaccactattggggccaacccaagactgactgaagcaaatatatgaccattttttttttttacacatagagtggagccatccccattgcaaaatcctagccgtctcttatttgcataacagcaagtcctctgggaattgaggtgagggtccaggggtcgctcagacgctttggtaaatcaataagcaagggaatttgtcatggtggaatccatttattaattcactcaaaaaaatgtgctaagcacctacccaactgtgctgggagttggggacactatagggactgagcctcaggtcttgccctcctggggctcacagtccattgggggacacacaccgttgccagtcagggacaacctaaagtggattgggtttgggaagcccatggggctagggaagcacagcagggacacctagcttggactgggagtcgggaaaaacttcctggcggaggggacagctgagctgagtcctagaggaggatagagagtatagaaagaaatagaaaaaggccaaggccaagaaaatagcacagccatagatctgttggtgggga[132 bp omitted]cgaaaccccgtctctactaaaaaatatatatatatatatacaaaaaattagctaggcatggtggtgggcacctgtgatcccagctactcgggaggctgaggcaggagaatcgcttgaacctggaaagtgg[132 bp omitted]gtgtggagagaggggttagtagagaccagattctgcaggtactataatgacattcccaggctaaggagtttagatcttttcttcagggcactggggagctattgcaggttttgaacacgagaggggcaggggcaggtttgtgatttaggaaagacccctctggccccagactgagcgtgactggaagggagaggagtgagactgagcaggagaccagggaggaagtggggtggggaccctgcagggtggggtgaggaggagtccagaacagggccagggacatgggacagagaggaggggaaggattcaggagacactcgggaggcaggacagttgggcttggtgagcagccggcttgggaaggaaaatacagggcagtaataaatagcatgggtcaagtggtctgagtgaggctgggagtggtggcacgcacctatggtcccagctactcaggaggctgaggtgggaggattgcttgagcctggaagtttgaggctgcagtgagctatgatcgtaccgctgcactccactttcggtgacagagtaagaccctgtctcaaaaaaaaaaaaaaaaaggaaaaaaaaaaaaagacactgcctatgagttaaccctgctctacaaggagcagtttttaaagtaaaattaaaaaaaaaaaaaaaaaaaaaagaaagaaagaaagaaagaaagagagagaaaaaagaaaaaaggctgggttgccttggacaacagacttcatctccctgagcctccatttcctcatctgtagaatgggggctgttaagaggagttgcaaggcttgtgcatgccagcagtaagtgcagagtgacggtgcaattatcattacccccatcatctttattggggtcagcctgaaccctcgatatcccataatattcacccccatccttcaagggtctgccctaatgttcccatgacacccgaccagctcagctctccttatgagagggcctcacttttctattccctttgcagccgttatcccctttgtagttgttaattaagtgtgtaattacatgatggcttaatgtttgtctcccccactgggctgactgcaccaggagaccaaggccagggctgtcacccaccgctgcgtcctcagcaaatgcttgtttgatgagtgaatgacagatgaacaaatgggcaagtatttgactgattaatcacggcatgcgtgattaaataaatgagtgagcaaacgactgaatgagtaagcaattgaaggggagagatctaggataatttccaaactgccaatatcccagaactgggtagatgactttttctccgtcttttggagtgggtttttatactccggagggggaaataagtaacgacaatcagagatcggagtgacagagaatgagtttgcgatgcggaaggccgcagcgacctctccaggtgcaggctggaggagcgcctcccgggcaacaagcaaaagaagtccggttcgataagtaagatttaaggcgcttagttactaccgcccgaaaggtggaattgaaccactctgtcgctagacagctacaggtttgaagcctgcaccccagaccactgaggatcatccgggcaggacaaccttattcccgcgcagctatataaggatcgcaaaagcttaccttttagagttatggtcgcgtcctttggaaaggtgtgagatggttgacttcaagggctataagttctccccactcatttatcgtgagagatgtccttgtaaaacgttgccttcacttcatatagtatgaatcatcctcgctccccaaaccgtctcatttacatagcgccacgcattctgggaagcagcgtttgagcacctggcaagctgttaaagggcccaggaccccctttttccaaaatgaaaagtcagctttttaagaggagagattcatgattcggcattcagaagcgccttctcggaaaattccgaattctctttctgcggaggagtggtgagtgggttcctgttagagtctgattcaccctggccccaaaggctctgagcaggcggctatagggctggtgcgacacctgctgttcttttatggaattgcgtaggccgatggagctccgcgttcattcaaacgtttattgagcgtctactgagtcccaggaactgtctcggtgctggtgacgacagacatcctgtcccgattgagtttaaacactagacataaccaatttctgcacttgcgttttatggttggagaaactgagacagactcagaaacggatagtaccatattccggttaaaacagcccatccacttagggaaatcgaacttgtgttacaatttttattacaaaaaaggtgattcttttttcttaaatttttacatatttaggaggtacaggtgccgatttctacatgcatatgttgattgcatcgtggtgaaatctgggcttttaggtgtactcatcacgaaaaattattcaatattctaagtcagtgattctttgacaataccattctcctgcatgaaactctcccatgacttccatttcagagtaaaagtcaaagtactcaccctgctttacaaatccctgtaatccagcccctttggtccctctgaccctgtctcacatactcctcttcccttggatattattggatttaggcacacagatgtcttgctgcacacatggatcatgctaccaccacagggactttgtgcttgccgatcccctagcctggatctcctcttcacatgttcccatggctcatcgcctcccttcactctgtcatctgatcaaatgtcaataccaaaaactcactgagtgaccagcactcagtggggccttccctgatcccagtttaaaatagcgagtggcggccgggcgcggtagctcacgcctgtaaccccagcactttgggatgccaaagcgggtggatcacgagatcaggagatggagaccatcctggctaacacggtgaaaccttgtctctactaaaaatacaaaacattagctgggcgtggtggcgggcgcctgtagtcccagctactcgggagcctgaggcaggagaatggagtgaacccgggaggcggagcttgcagtgagctgagattgctccactgcactccagcctgggggacagagcgaggctccgtctcaataaataataaataaataaaatagctagtggctgggatcggtggctcagggcctgtaatcccagaactttgggaggccgaggcgggtggatcacctgaggtcaggagttcgaggccagcctggccaacatggtgaaaccccgtctccacgaatgatacaaaaattagtcaggcatagtggctcacgcctgtaatcccagctactcgggagtttgaggcaggagaaccgcttgaaccggggaggcagaggttgcagtgagctgagatggtgccattgtactccagccttggtgaaaagagcaaaactccatctccaaataaaagtaataataataataaataaaataaaaatttttaaaaagcgagctctgtcactctatccccttaccctgctagacatttccccaccactctgatcaccacctgccattttctgtgtctatttgcttaccgtctgtctgcttctgtagaatatcagcaccatgaaactatgcactttatttttgatcattgctgtatctctagtgcctaaaaagtgcttgagaacatagcagatgttcagtaaatgtttgtggaatgaataaaagaatatcatcactgtctttttttcattcttcttccagacaggatcttactttgtcacccaggctggaatgcagtggcgcaaaaacggctcactgcagcctcgacctcccaagctcaagtgatcctcttgcctcagcctccctgggatgacaggcatataccatcacgcccagctaattttaattttttttgtagaaacaggggcctcactttgttgcccagactggcctcgaactcctggcctcaagtgatgcttctgccttgggctcctaaagtgctggaatttcacgcgtgagccacagcacctggcctcactatccttctttcagcctcagttttctcatttgtataaccagactagtacaactgatctcactggagaaatcatgatataaaattctgacactggctgaggcaactgggaggagctcagtaaaggctgtttctgctgggcacggtggctcacacatgtaatcccagcactttgggaggccaaggtgggtggatcacaggagattagaagttccagaccatctggcaagcatggtaaaaccccatctctactaacaattcaaaaagtagccaggcatggtggctcacacctgtgatcccagctactcgggaggctaaggcaggagaatcccttgaacccaggaggctgaggttgcagtgagccaagattgtgccactgcactccatcctgggcgacagagcaagactctgtcaaaaaaaaaaaaaaaagtttttttttttttggctggaattacaggcgcctgcccccacacctggctaatttttgttttttgtttttttaggagagacggggtttcaccatgttcaccagactggtcttgaactcctgacctcaggtaatccaactgcctcagcttcccaaagtgctgagattacaggcgggagccactacacctggccaataaaggccgtttcagtcttcaatctgttttgagcttggaggctttagtcattcccagacccaaaatctcaatcagaccctcttccaccactttttgtgatagatcaataaacattttgtcttatgggaagtttaactaagagtatctttagaaagttttggacaggcgctgtaatcccagcactttgggaggccgagatgagcggatagcttgagcccaggagttagagacaagcctgggcaacatagtgagactctgtctcaaaaaaaaaaaaaagaaagaaagaaaagaaaaaaagaaaaaaaaagtattccctctgcttggcaaatccagattcaagatatatcccctaaaccctctttgttttaattagatagttgctgctaggcacctctgtatacaaattctgaggatgtaaggactccttggaacaccgttatctgtctcctaatatgtgacgtgtgtatgacgaacaagtgagttttttttttttttgtttcttttttttggttttttgttttgagacgcagtctcgctctgtcgcccaggctggagtgtagtggcgcgatcttggctcactgcaagctctgcctcccaggttcacgccattctcctgcctc[215 bp omitted]caggctggagtgcagtggtgtgatctcggctcactgcaacttccgcctcccgggttcaagcgattttcctgcctcagcctcccaagtagctgggattacaggcatgcaccaccacgcccggccaattttgtatttttagtagagacatggtttctccatgttggtcaggctggtctccaactcccgacctcaggtgatccacgtgccttggcctcctaaagtgctgagattacaggcgtgagccactgcgcctggctgcacaaacattttaaacgtcaatatttttgtgtttatttttactattgtcttctatttctggcaagcaatactggtttctggtggcaaggtaacctttcttcttaaaatacatttgttattatattattaaatattaaaccaattttcaagaaaaatattagataaatagcagaacaggttgtagaaagatgaaggtcatgtggggaatgactgaggtttgggaaacaatattataactccttactgtgcatttattatatgccaggcccaatgccaagggctttacatgtaggtatagttatggttgacagttttcttctttttcttttctttttttttgaaacagggtcttgctctgtcgccctgtctggagtgcagtgacacaatctcagctcactacaacctccacctccttagttcaagtgattctcctgcctcagcctcccgtgtagctggtcttacaggtgcccaccaccacatccggtatttttagtagggacgaggttttaccatgttggcgaggcttgtcttgaactcctgacctcaggtgatccaccttccttggcctcccaaaggctgggattacaggtgtgagccactgcacctggcctctttttttcttacttaatttttttgtagagatgaggtctatgttgcccaaacttgtctcgaactcctggccttaagtgatcctccctccttggccttccaaagtgctgggattgcagacgtgagccatcgtgcccggcctaataagttttccatttgaggaaactgaggctttgagagatgaagtcatatgctcaaggtcatacagcgaaggggtagtagagccaggattcaaacccaagtctgtggatctttagacctcagtgttctcccagtctccccacgggtccctttgcttcatcctttccgagtttagttgtcttttttgttgttgttcttgttgttgctgttttttgatagagtctcgccctgttgcccaggctggagtgcagcggcatgatcctggctcactgcaacctctgcctcctgggttcaagtgattctcctgcctcaggctcccgagtagctgggattacaggtatgcgccgccacacccagctaatttttgtatttttagtagagatggagtttcatca[137 bp omitted]acagggtctccctctgtaactcaggctgaagtgcagtggtgtgatcatagctctctgtaacctcgaactcctggcctcaagcaattttcctgtcttagcctcccaagtacctgggactacaggcatgcaccaccacgcccggataaattttttttttttttagagacgggggtcttgttatgttgctcagggtggtctcgaacttttggcctcaagtgatcttcccacattggcctcccgaagtgttgggatcacagatgtgagtcatcatgccaggcctcagattagtgttgaaactggaagtccagggaggccctgtatttgttcccgaggcaatcagggtggggagacgtgggtggatgagagaagtttgtgaggcaggatagacacagcattgtgactgattgtttgtgggaggtgagtgtgtagaagtccagagccatacctgggtgtctggcctggtgacaccgtgggcagtgaaaacatctctgagttggaaatcaggtaggatgaagaagacgtttggttagatttagggtggaaggggcatccagaggccgttggacacgtgggtttgggctcagttgaggtggctgcacagtaggcagggtgtgggatccattagtgatgtctgccttgagcacaggcatgggaagtggctgccaaggcttggctaaccctggaatgggtggtctgtcagcatcttcccctcaatcatttctttcttttttttttttttgagacagaatctcgctctgtcgccgaggctggagtgcagtggcgcaatcttggctcactacaacctccatctcccagattcaagcgactctcatgcctcagcctcccgagtagctgtgattacaggcatgcaccaccacacccggctaaattttgtatttttagtagagatgaggtttca[141 bp omitted]gagctccttctccagagatggggaaggttctcctggagtgtcacttaagtgcctttcagtgcagaaaggtgaacaactggagggttctggaagcacaagaggcctcgggttttccacaggagtctttattacagtgtaaatccaagctcaggcctcccctgggccccatgcaaagccccggcgttggggctagtagcatccaggagacaccaacgcctcacggcgcctccagcggcgggtccggaagtgcagggtggtgccctgtctaggcaactacaagtcccagcaggccccgcggccaaggtgcctcgtctttcctggactcctggagcagagcctcttgggaaatgtagtcctggtcgctcaggtaattagcgcagagtccctagtgggagtgatcctgacacccaccgggaaaaggctcgggccgaggaggggggtgggtgggaacggacaagagatggagggggccagagggctgcgggggctgggggcaggcgtcctgcgggcagagacaccgttctcattcggctttggctttggatccggagactgcggctgctgcagaggccagggctccggtccctgggattttagctcggatcctgaaggagaaacaggtgggatcacgaggtggggcaagagacgcggggtgggcatctggggacaacggggaaagctgggtgggaaactgaccaagagcccgaagccagctcctgccctccacctagtggcctacattggaattgcctcctcagccttttcaaggggacattaccccaggagatttgcggacagcgagagtagaaaggaaaggttcccaagctcccccacttccccctcccatcgacctccgccccatgctcttacttagctttgatgtggctcaactgattggtcaccaaccccacatattggtcgatctgagcctggggagaccaaagaaaggtgaaagaagggattggaggggtttcttctctttagtcacataggaggctgcttcctccccaacctccaaattaggagttgtgaagagtggcccaccacgccacccccggctctaaacttcatagaatacattagatgccagagatgccagttatagggtcagtgagttgggccatactctgtatggagagtgatgtcaggtggaacgcacaagtatctggcagtgaggccgtgtcctgggcacgatggttaatctttgagtgagtttgcatacgtgtgtgttgtggggtagggtgagaacagaaggcactggcattggtcaccgagtccctgagtggattgatttatatactcgtgttttttaaaaaattatttatttatttgtatttatttttttgagacagggtctcgctctgtcacccagcctggagtgcagtggcatgatctcggttctctgcaacctcagcctcctgagttcaagcgattctcctgcctcagcctcccgaatagctgggattacaggtgtgcaccaacatgcccggctaatttttggattatttatttatttttttcttgttcttttttttttctttttctttctttctttttttttttttcctgagacggagtcttgttctgtggcccaggctggactgcagtggtgcaatctcagctcactgccaccactgcctcccgggttcaagcgattctcctgcctcagcctcccgagtagctgggattacaggtggacaccaccaagccttgctaatttttggatttttaatacagacagggttttaccatgttggccaggctggtctcgaactcctgacctcaagtgatccgcctgcctcagcctcccaaagctgggatcacaagcgtgagccaccatgcccagcctttttttttttttttttttttttttttttagatagggtcttgctctgttgcccaggctggagtgcagtggcatgatcacagctcactgcagcctctacctcctagggttcaactcatcctcttgcttcagctttcagagtaactgggactataggtgtgtgccaccacacctggctagtttttaacctttttgtagagatgggggtcttactatgttgccgaggctggtcttgaacttctggcctcaagcaattctcctgtctcaacctcccaaagtgccgggattacagttgtgagccactgtgcctggcctgatttaaatacagtttaattgtgagtcttggtgattccagcctgtgaaggacagagttaggactaactggcagggcatattatcatgtggctcccagctgtgctggagaaggggctgtcagtccatccgcctgtctctggataggatggatgtcagcagtcctgctaatgtcagtcttgtgggcaacagccatcccactcttgattttatttttatgtttttattttttattttttggttttttttttttttttttttgagacagactcttgctctgtcacccaggctggaatgcagtagcatttaactgacatgtcagttaaaatcaagagtgaaggccaatctcagcactttgggaggccaacgcgggcagatcacctgaggtcgggagttggagaccagcctggccagcatggtgaaacccggtctctactaaaaatacaaaaaattagccaggcatggtggcaggcacctgtgatcccagctactcgggaagctgaggcaggagaatcgcttgaacctgggaggcagaggctgcagtgagccaagatcgtgccactgcactccagtctgggcaacagagcga[137 bp omitted]atggcaaaactccgtctctgctaaaaatacaaaaattagccgggcacggtggccatatgcctgtaatcccagctactcagagattgaggcaggagacttgcttgagcccaggaaacggaggttgcagtgagccgagatcacaccactgcactccagcctgggcaacagagcaagactctgtctcaaagaaaacccaaaacaaaacaaaaacaaacaaaaagcctgtccctggctgatgctgataagacatgttacttagactctggttgtattgggaaggtgctgcagccaggacacctgtgtctggccgggacatctgtcaatgggaccccggttctggaaggagatggtcagacccccatgtttagctggggtgctgacaactgagggtgtcacactcacctggtgctgccggtacagcagggggatggtgaatagaccaatcactcctgtgggtacagagatgggggcgtcagggtgttcccaagagatgaacagttccatctggagccctgtcccccaccagactccaagtccccatttgccccttacggccttcccagctcacccagaatgagaagagtcaaaccattgaagatggcacccacgaaggtcaagatgtagaagaggagggccagctgggggtgaaggtcagggtcagcagagcccaccgggaattccctctcatgctgtgaatttacccaacagtcgccctcccaccccctagccatgcagaggtgaatgggggaacccaggaggggctgagagctccaggccaccttgagggaatccacgaggtcttctaccaggaagaagtgccgcagctgcgtggccgccgagaccacgcgggaggtgatctggtgggacaaacgttccgtctgctcccgagtcagggtgaggtccacatccaggtaggccctgcggggacaaaggagtgtggggcgactcagtgggtgaccagctcagactggtgcaggggcagctgaaacaagggagaggaatggcggttgggagaagaccagagttaggactgaggggcagctcagaggaatcatatgtagagggctggggtcagggtcagggtcaggggaagggatcgaggatgaagggtaccaggttaggatcagagattaggattgaagggtaggttaggggatcgggatgaaaaatgatcaagatgagtcggggtccgggtgggagtcggtgcctgatttgaggtcgtgggtcatgctttagggtcaggacaggggctcaggtcaggggccgggggttctcactggaaagggttggctccatccccccggtgcacggcctgcagcactttgcggtaaaccctgagagagatggtgccgcagagcagcaacagagccaagtgcgcggccacggacacgatgctaaagtgcaggaggcagaggagggagaccatcaggcctgtgaagaccactcctgacgtcctcgtgtccttccagtacagcaggtccgccactgtggaggggtggggggcatcagggcttgtacctgacctggctggtctcctcacctccctttccctgtcctacagctgaaaatgacttctcgacacacctgtttgagcataacctgatttcctttttttttttttttttttgagagacagggtctcactctgtcacccaggctggaggcagtggtgcaatcatagctcactgcagcctcgatctcctgggctcaagtgatcctcccacgtcagcctcctcagtagctgggactacaggtgtgcaccaccactcagctaatttttgtttttgtttctgtttttagaggtaggtggctctcactgtgttgcccaggctagtctcgaactcctggcctcaagttatcctcctgcatcagccctccaaagtgctgggattatacgtgtgaggcacagcacacagcccgatttgcaattttttaaaaattattttattttatttttatttttttctctattgcccaggctggagtgcagtggcgcaatcacgactcactgcaacctccgcctccctggttcaagcgattctcctgcctc[134 bp omitted]gcctcccaaagtgctgggattacaggcatgtgctaccgcgcctggccttaattcattattttaaagagctgcatagtattctgtgttgtggctgtgctcctgtgctctcattcattttatttaaccatgtacctattgctgggtcattcagtttgtttcctaaccccttcaccgcaagcagggctgcaagcaacatcctccaacagatattctcacctcctggagtgactatttctgagacagattcccagggtggaattgctgggtggactggttgtgtgtctgtgtgtgtgtgtgtgtgtgtgtgtgtgtgtgtgttttgtttttgtttttattttttttgagacggattctcgctctattgcctaggctggagtgcaatggcacaatcttggctcactgcaacctccgcttcctgggttcaagcaattctcctgcctcagcctcctgagtagctgagattacaggagggctccaccacacccggctaattttttatattttggtagagatggggtttcaccatgttggccaggctggtctcgaactcctgacctcaagtaatcctcccacctcggcctcccaaagtgttgggattacaagcgtgagacaccacgcctgaccttggtttgtttgtttgtttttttttttgagacagagtttcgctcttgttgcccaggctggagtgcaattgtgcaatctcggctcactgcaacctccacctcccgggttcaagcgattctcctgcctcagcctcccgagtagctgggattacaggcatgtgccatcatgcctggctaattttttgttatttttagttagagatggggtttcaccgtgttagccaggatggtcttgatctcctgacctcaggtgatccacccaccttggcctccaaaagtgctgggattacaggcgtgagccaccacgcccggccacattttttttttttttatttttagaggcagagtctcactctgtcaccctggctggagtgcagtggcgtgatcatggctcactacagcctctacctcccagagtcaagcaaacctcctacctcggcctcctagcagctgggactacaggtggcaccacgatatcgtgctaatttttttttttttttttttggacaaagtcttcctctgtcacccaggctggagtacagtggcatgatctcagctcactgcagcctctgcctcccgagttcaagagattcttgtgcctcagcctcccaactagctgggatcacaggcatgagctgccatgcctggcctggctaatttttttttttttttttga[134 bp omitted]catgcccggctaattttttgtattttagtagagacggggtttcaccatgttagccaggatggtctcgatctcctgaccttgtgatctgcccacctcgacctcctaaacctggctaatttttaaatgttttgtagagatagggtctcgctatgttgcccaggttgaattcctggcttcaagtgatcctcccacctcggcctcccaaagtgttgggattacaggcatgagccaccgcgctcggtcatatatatttttttaatgtcataaattttgaaacactgcttactagtaagaccataacagttcttatttccacaagaagcaagagaaagatcttttcccagcatcctgccctgcagtgggttgcagttctttttaacttttgccaatctgtcaggtgtaaagtgatatccccttgatacccttagcaacacatgtttctaagtcctaaatgtattaatcacgccatactcctttccagggcctaactcaaatttctgacccctttctgagaccctaaaacacacctcctaaacccaacctcagccctgaccagtgacctttgtaccccaaccttcatctcatctgtctaaactttaggctcactcctgtaatcacaacactttgggaggccgaggcgggaggatcacctgaggcctggacaacatagtgagaccctgtctctacaaacaaaataagaaaattagcagggcgtggtggcctgtggctctagtcccaactacttgggaggctgaggtgggaggatcacttgtgcccaggtgttggaggctgcagtgagctatgatcccaccactgcactccagaaagggcgacagagggagactctgtggcttaaaaagaaaaagaaactttagtaatctgctttcctttgagtcctgaaaaccaggaactcagtacctttctatttctttccagatcctctctatcctcccacactccctccaactgacccctccgaccggtccctcttagaggctcacccctcacttccgtctccttccaatgcatctcctctcatttacctccaaatagggcagcccctccctccccatagcagggccctcccaggcaggctcctagtggccggcgccggtggatgggggaggggccaggtcgcctgaggcgggggctaagtttaggcacgctggggggagggggcctccccgcagctgttctggcccgtctggcccctgagtgacagcgctgcctggggccgaggctgggggagggggtcctccctgctcctgggccccaaagtgctggctcgaaggagaagggaccccatgctccctctgggtcctccctatactgcccctcggccccctagccccagcctgcagcgctgcggaagcagatcagtaataaaaatgctccggatgtgcaggagataagggcgagtttggaccccgttccgccgacctcagcccccgtccagcccgttccgcaagcccacctttactccccatatcggctccgagtgagaggctggggacaccgctgcttctcggggattttgcccacttcagtagaacccggaggacaggagtagggggggtggggcccctttggacccagccaatggctgtccacagaggtggggacaattccaaaattggaaccgtcttgtaaacagccaaaagcaatgatgtctttaaccattccatagctgttcctggaggcggagcatattttaaagtaaggctgggtcattttacaactggccaatagatgtggtcaggaaaaagagggtttttgtttgttttttcaaatagagatcgagtctccctatgttgcccaggctggtcttgcactcttggcttcaaaggatcctcccgcctcggcctcccaaagtgtttaggattacaggcatgagccactgcgcccggccaaaaagaagagtttttaaaaggcacagagtttacttataaatattctacggccacatctaaataaggagagaactgtattttttcagggatttggcctgtccaaaatcagccactaggaggag[144 bp omitted]gcctcccgagtacagacggggtttcaccatgttggccaggctgatctcgaactcctcacctcaagtgatccgcccgcctcggcctcccaaagggctgggattacaggcatgagccaccgcgcccggccggggaaatttttttaaaaagcggagtttatcacgtctagccagatgtgatatcacgtctatctcttcccttttccactatgtactgttcctttgcgaggttggtccctttaattcaaaatcctctcaccttttgccttctgtgggccaatgcagcatcttcatacacgttgcttacctagaaggcgtggctccaccgtgaattctaattggtccgtgctatcgaggcactgtccccttactggctctcgctccagtggcccccactgcttttcttcctcttccagcaatggctcttcgggcccagagttcgaatctcgcgatcgggatggggacggagtaccggcctggggtgtcccagagcccggactgagctggggagtcaagacctcgggcgatgagggctgagcaagtcggagtcgtaggtccagttctgatacggtagagagaggaggccgtgagctttcttcttggaggtgccccaaggagaaaccacccacccctcttggctttggtcccagcacctcggacatctcaccttccccagcttctcctgtctccaatctgttgggttcttggggttcttcgtcttccagcggggtggagctgctggtggaagagtcctccccggatcccgttccccgggccacccagcccagatggtccaaccgaagcctcaggtcttccagagggcgctcggatggaggcgcggtgtcaggatcaccccgtcgtccaggctccggggattggctcaggctggggatgctctccaagctgtcgcccaggctgggctgagggtgctggtctcgtggttccgagactgagcggccctgggggcgggggcggcgggcagttgaatccctgcggcccccggagcccactacaccatcaaaggcgatgtaggagaaggtcagctcccggggggtgccccagtcctgcgacgtggtctcctcctcgtcctcctctgagaattcccgggctgtgtgcagctctcgaaaatcagagtcgtcgttccctcctgcagtgggtgaaggagagccttgtttccctcagcaggtccctgagctgcccagccctgagccccttcacatgctccccaccacttaccttctgtggaatcaggagttgaggaggctgtagacggagcttcttctgcgagagggaaagaatcgaagactcttagaagcttagactgtccgaatcacagaagtgtcccagtcctggaatcttagaatatttgaatcacgggatttttagaacattctgcacacagactctaaaacctagcatcactgcctgatgaagctcagagtctttgaagtccaaatccaggaatcttaatcttagagtcttcaaagtaggaatcttaggaggtttcaattcattcattcgttcaacaaccacttattgagcacctactatgtgccaggcactgttctaggtcctggggatacagctgtgaagaaaacagacaaaatccctgccctcctagagctgacactctttgggatagacaaacaataaacaagtgaatatatgacgtcgggtgcagatgagcatagggagcaaagtaaagaagggtaggggaagagaaagtgaaggggtgctgtttctcatagggtggtcaagaaggcttctctgataagatgacgtttgagcagagatctgaaggaagtgaggaagccatgcagatgttcagggacgtcttccaggtagagaagaaagccagtgcaaaggccctgagccaggcaccatgcttggcatctgaggaactgagaggtgcgaagatatgactggagaagagtgactgaggaggagaggagtgggaggtgagaacagagaggtaagggcggtggggagagacagacgaggtggtcctccctttgtaatctgaagttaacgacaagatcatagaatgttgggatgatactcgaaaatgctgaaatcaccaattcttagaattttggcatctggacacgcgagacatggaaatggctagatctaagggtgttgaaatccccagctgtcagaacccccatgtgtgggacagagaacggtagacatggactgttatagctgtgagctcagagattgtgaggctaggcgttttcagctgggaatccagccccttagagctagttcagagctttgcacatagatgatgctcaatgcggtttggaaattgaaatctgacgccctgtgccctcacctcgtttcctcagctggggaataggaggcctggaatggtgtgggtcttccccaggattaccattaaccagtggtaaagaccgctaagaacccatgagtccttgcccccaaaccacggatggctgttttcccgggacagggttggacagtttgggcgaggtcggggctgcctcttggacagaaaacggggatgggatgcgaaggcaagtgattgggagccagacccctgttttccatcctggctctaccctccgttcaaccccctccccgccagctgcggccagcaccagagccaggggacagctccccgcgcgcgtcctcgctcccgggcggggccgggcggtacgtcccagagcgcagcgcgccccccgcctgctgtctcagtgccccctcacctccgccctgtttcgtccaggtcctccgggtcaggctacccccgtcgccgccagagcgcgggggaggggagagcttcctttgtctcctatgcctcctccccccatcccggctctcctgcgggcaagcgccgaggggacaccggggagtaccccacctgaacctctggggcccacaccaggccccagtcttcctctactcactgcagtgggcgaagaccggcaggacctgccccatggcccccctcgggcctgcatcgggacccccgcccactccggctgtgccgccctgggcccggggtcgcgggcgctcatctccgccgcgcccacgacgccgctgccattctcgccgcctcctcctcccgggctgctccagccgccgccgccgccgccgccgccgccgccgccctggtgctcggctcggcgggggcgggcggggccgaggtggggaaggcactgcagcgcgcggccgggggcggggccagaagacgggcggggcggtaccagagggagggtgaggggcggggaaacgccgaggatcaggcggaggggcgtggccttcttactaaaggggcggaaccaagagggtgggctacggagccaggaaggaggggaaagcggcctgaagggcggggcctagatcgcagagggcgcagcctttaggggaagagggaaggaggcctggagtctggcgagggacttgggagaggatggtgaacgagccacggcagagaggatgagagcgtggatccctgggtgggttggggtggtgctcggggtgccattgaggagggggtggaaagattctaatgctctgaggtagggtccgagcctagatttgcagagggagcgagaaagggggccgaatgaaacgattcagaaacttttggggcacgcggaggagctcaaacgtgggcagggctaaagcaacagggaattattcaaatataactgggtggggtcggattccaggcgattccaggtctgcgaaaattagaagggtctggagctgtgtgcctgaatcctggatgggcggggcctggaagagaaaataagcgaagccccagaggggaggggtcgaactaaaaacagtaaagaaaaaaaaaatatgtatatatatatatatatatatatatatatatatatatatatatctttttgagacagggtctcgctctgttgcccaggctggagtgcagtgatacgatcacggctcactgcagcctcgacctcccgggctcaggtgatcctcccacctaagcctcctgagtagctgggatcacaggtgtgttccaccgcgcctggctaaatgttaatttttgtagagacggggtctcgctatgtttcccaggctggtctcaaactcctgggcttaagcgatccgcctgcctcggcctccctaagtgctggggttataggcgtgagccaccgcgcccggccaagtatggtatttacaggttttgaggctgggggctgtaccactgaggtgggaggagcttggactgagtgttgtgttgagaacacagattctagaattagtttccctggaacaccggttacttctgtgactctgtttcttcttccatatgtaaactggagatgatgatgtataacagtgtgtgacacattagtactatgtaatagtttgccactggtacagtattatcttttttctttttttttcctgattcagatcccaaaccccgctttgtaggtgcaggaaacaggagacccagaagtgtaattccttctagtgacccgcctaaagagcaggtcaaaggacaggaaggagatttagatggtttaaaatctcacagcggaggggattaatggagggggcgggcaggtgtacagggtggagccttcctgatcccagggctgaaggatggcggtcctggcccgccagctgcagcgtctcctctggaccgcttgcaagaaaaaggagagggagaaggaggggagggaggaagaggaggaggaggaggcggggcgcagggcccccgaagggcctcggtctctgttgacagcgccgcgccgcgcccagcggccgcacgggggtgccgaggcgtctgggggcctgcgcttcggggcgagcgcagcgcaaggctggcgcgcgcgcatggaggatgctcactgcacttggctttcgttacctggtctgcccccgggctgggccttgtttgccgtcctcgacggccacggtggggctcgagctgcccgcttcggtgcacgccatttgccaggccatgtgctccaggagctgggcccggagcctagcgagcccgagggcgtgcgcgaggcgctgcgccgagccttcttgagcgccgacgagcgcctgcgctccctctggccccgcgtggaaacgggcggctgcacggccgtggtgttgctggtctccccgcggtttctgtacctggcgcactgcggtgactcccgcgcggtgctgagccgcgctggcgccgtggccttcagcacagaggaccaccggccccttcgaccccgggaacgcgagcgcatccacgccgctggcggcaccatccgccgccgccgcgtcgagggctctctggccgtgtcgcgagcgttgggcgactttacctacaaggaggctccggggaggccccccgagctacagctcgtttctgcggagccagaggtggccgcactggcacgccaggctgaggacgagttcatgctcctggcctctgatggcgtctgggacactgtgtctggtgctgccctggcgggactggtggcttcacgcctccgcttgggcctggccccagagcttctctgcgcgcagctgttggacacgtgtctgtgcaaggtcctgggggcgtggcgtggtacctttggggcttggtgcagcagagggagagagcctcggggttttggggaggagggctttgatagagaggcaagagtaaagctagcaaaggaggggataggactcaagcgaagggcgtggcctgaagtgggcagggccaaaatacaggggcggagcctgagggatgctttgaggcacgggagagttagtggaagggacttaagagaaagggcgtggtcttttggaaaggggcgattctgggtcgtaggagccgggccggaagtattgattagtgctggaaggtggaagagcaggtaaacatcagagcgggcggagctttagggaaaaggcattgttctctcaattgggagcgcctaggaccgggtttggtcccagtaagagaggattggcaggtgggtgggacgcgaaagaaatgggcataagtagaatgaagtgggggacttgaacctggggattgttgggaagctctgccttggactctcccccaccgggctcctttttctccaccggcttcagggcagcctggacaacatgacctgcatcctggtctgcttccctggggcccctaggccttctgaggaggcgatcaggagggagctagcactggacgcagccctgggctgcagaatcgctggtgagcagactctgggggcccagctggaggggtggttggccagtgaaggctgtgccataactttttctttttttctttttttttttgagatggagtcttgctctgtctcctaggctggagtgcagtggcgtgatcttggctcactgcaacctctgccttccgggttcaagcgattctcctgcctcagcctcctgagtagctgggattacaggcatgcacaatcacacccagctaatttttgtattgttagtatagacggggtttcacgatgttgtccaggctggtctcgaacccctggcctcaagtgatccgcccgccttggtctcccaaagtgctgggattacaggcgtgcgccactgtgcccagcctaactcttgactctttctcagaactgtgtgcctctgctcagaagccccccagcctgaacacagttttcaggactctggcctcagaggacatcccagatttacctcctgggggagggctggactgcaagtgagttggggtgaggaagggtggggtggaatgagggtggggtggaaggaggagagtcccctcctgagggccttcctgtgctctccagggccactgtcattgctgaagtttattctcagatctgccaggtctcagaagagtgcggagaggtaaggatcctgtgttctccagtgtttctcttaggaggggacgcccccccgcccacccctcttagtgacagggaaattgaagccagtgaggataagggatttgcctgatatattttattcctcttttctcttctttctttctctttttttcttttcttccttcctttcttttctctctctctttttttttagactgggtctcactatgttgcccaggctggtctcaaactcctgggctcaagggatcctcctgctttggcctcccaaagtgctgggattacaggcgggagccactgcaacccagccagcttgctatattaatacattcctactcccagccctgaagcattgtgcaaggcatgaggagggagacgcagatgcagagaagagactgtgattcccctccaagaaatgtgagccggcaacgctctgcagtgccccatcagcccaagtgcttcccacatccaagaataagatggaaacattcagggaatgctaatgaccaattctaaggcctagacgcacagcagataccatcaggacatacatgagtatgatccaggtcttagacaagagaagctgtaatggggcccagatagctaaggagaatttggagatatccaaagatgtatagtggtggaccaaggcatggagtggcatcagggaagaaatgggagggaggaagctgggtttagagccccaaggcctttgcatggcagaggtgggagtttggtgattatcatgttgatgagggaggattgttgacaatttctcagtagctgaaggaggtatttgtcagttttctttgagtcgtgagagatggaagcccaattcaagctgggaaaacaaaacagggaatttactgggccatgtaattgaagagtttagagtcttaaggcatggctgcatctagttgtcagatgatgtcatcatgaatggtctctttttattttctccgagttggcttcattacctttcagggtctcctcctaaggtagcggagacttgcagctccaggcttacaccccagcagcctgtcctccccagtggagaaagtttgccaatttccccggagttgcagcagtggtctttgggggctggttctcattggccacaccaggtcacatgctgaccagtcactgtgtctgattggccaggctggggtcgcacttggggttggggtccactccattcaaaccttaatggattgtgagatgggatatggtggtccctcaaaggaaaaggaagaggtgccaggagacaagacagaatttctcattaccttctcccacattttgtgttacagaaggggcaggatggggctgggaagtccaaccccacgcatttgggctcagccttggacatggaggcctgacagctgttgtcctttggggatcctttgcttctctggggcctcaacagaactaaagaagaaaaccgaccctttccccaactacatgtaccagcggaaggaaggaaggccaatgtaggaacccaaaatgcttatttcttcttctcttacttccctctcacagaaaagtcttacgaatggggaaattccaccaacatccagaccaaaaagaaaaaagcccaaatcgaaaaaaaaaaaaaaaaaaaaaaaaaacaaaaaaacccaaccaaatgtttttgaaatattcagagccgaacagattctgagagataacccagtccaataacctctttccttcttattactcatctgtttttgaggggaagtagagttttgattattaaactttatttacataagtgattccaaatacattttcttgtaaaaaacaagaagacatgttttgcctagtctgttagcaaatacgttacagggcacctgctgtgtgccaggtcttagcctcacagtcatgaaccaggctgacccaccaagatccttgccactgtggggctgacctcttggtcaggagacgcagcaaacaagggaatcaataaataaagtcatctcgccaggcgcagtggtccacatctgtaatctcagcacttgggggagtctgaggtgggaggatcacttgagcccaagagttcgagaccagcctgggcaacatagcaagatgcaatctgtaatttttttttttttttttttttttgagacggagtctcgctctgtcacccaggctggagtgcaagggtgctctctcggctcactgcaagctccgcctcccgggttcatgccattctcccgcccagtctgtaattaatactaaaaaaatgaagtcatcttgcacactgacaagtgtcacgaagaaaataaaacaggaggatgtgttgagaaaatgactaggggagctacttcgggttttttactttttccaatttttaaaattttgatttatttaattcaggtagttttgaatgggtaataaattcacttggtttgaaatgcaaagagtgcaagatggcatacaatgaagtctttctctatccctctcacacttcagccactcaattttccgtggtgggggaggtggcttttgaaacaggggaatcaggaaaggtctctgaggaggggacagttgagcagagacctgacagagaagagtcagctccgcaaataccccaaagagtgttctaaggcagagggaacaatcagtatgaaggcttagaagcaggataaaatttcccccctttttttttttttttttgagacagagttttcactcttgttgcccaggctggagtgcaatggtgcaatctcggctcactgcaacctccgcctcctgggttcaagtgattctcctgcctcagcctcccaagtagctgggattacaggcacgtgccaccacaccaggctaactttttgtatttactacagacagggtttcaccatgttagtcaggctggtctcgaactcctgaccttaggtgatccacccaactcggcctcccaaaatgttgggattacaggcatgagccagccaccaggtccggccaaatttggcattttcaagacagacttgagacctcccaagtgcggtggctcacacttgtaatcccagcactttgggaggccgaggcagcttgattccaggaattcgagaccagcatgggcaacatagcaaaaccttgtctctacaaaaaaaaaaaaagatctctgtgaccaccaaattaaccccacactctctatctcactggtaacccttgcaatgagtttaaagtggactttttacatgtattaatatatggtattctgggtgtttccttgatttttttcattcccttcgtatctctggcaactttttatccacttaatggatgttttcattctatgtcacccacgtcatttacacacttcatgccacccgtttttttaagagacaaggtctaagtctgtatcccaagctggagtataatggcgcaatcatcgctcaccacagcctcgaactcctgggctcaagcaatcctcctacctcatcttcccaagtagctgggaccacagatggatgataccacacccagttaattttttttttttttttagagatggggtctcggccaggcgcagtggctcacacgtgtaatcccaccactttgggaggcccaggtgggcagatcttctgaggtcaggagttcgagaccagcctgaccaacatggagaaaccccatctctactaaaaaatgcaaaaattagctgggcttggtggtgcatgcctgtaatcccagctacttgggaggctgaggcaggagaatcgcttgaacccaggaggtggaggttgcagtgagccgagattgcgccattgaactctagcctgggaaacaagaatgaaactctgtctcaaaaaaaaaaaaaaaaaaaagagagaaatggggcctcactatgttgtccaggctggtctcaaactccctgacctcaagtgatcctcctgccttggcttctcaaagcaccaaagcactgggattacaggcatgacacaccttgcccagtccacacctccttaagttgctgctcactccgtgcttcagaaaaggatgtccaagggtttcactattccctgccctcatcttttttttgttttgttttgtttaattttttttgaggagtcttgctctgtctcccaggctggagtgtagtgtcacgatcttggctcactgcaacctccgcctccggggttcaagtgatcctcccacctcagcccctcagccacccaagtagctgggattacaggtgtgtgccaccatgcctggttaattttttgtttttggtaga[153 bp omitted]ttcttgctctcacatcactgctaccgtaaagatcgttatgtacatatgcaagcgttctcttacacaggggtcttgctacctgttttgtacagcacttaagctaagaagagttttttttacagtttttaagccttgtaagaaaaaagaaaaactgaagagtgtgtaaaccagaccctatgtctagcatatctaaaatatttcctatttgaacttttacagaaaatgtttgccggctgggcctggtgactcacacctccaatcccagcactttgggaggctgagccaggctgatcactttagcccaggagtttgagaccagcctgggcaacacagctaaaccctgtctctacaaaaaattagcctggcatggtggtgtggacctacagtcccagctactcagtgggctgaggttagaggatcgaatgagccctggttatgctactgcgctccggcatgggcaacaaagaccctgtctccaacaaacaaacaaacaaaaaaccatgtttgctgactgttgttgtagtgtaggtggcacccagaaatgccacccctcctatgtcacagatgggaaagctgagacccagagaggagaacacagttacccaaggtcacactgaactggtaactcattcaactaggtaagtttgttgagctgctgagccgggcgggcctggctggggtgagtgaggtccagaaattgattaagtcaactgggtgcagtggctcatgcctgtaatcctagcactttgggagactgaggcaggcagatcacctgaggtcataagtttgagaccagcctggccaacatggtgaaatcccatctctactaaaaatacaaaaattagttgggcttggtggcccgtgcctgtaatcccagctactttaggagggtgaggcaggagaattgcttgaacccaggagggggaggttgcagtaagcggggatcgagccagcgccctccagcctgggtgacagcgagagactacatctcaaaaaaaaaaaaagaaaaaaagaaatttagtctacccattctcccagacaactcagcctgaggaaacacactgagaaacaatgataacctccgaggaacagggttcaaggtctcccagagtggggtggagaaggggaggggaattaatgtcaaagcttggcctggaaggatgacgtgctccccaggtaaaggaggtcaggacaacatcaacatccggacatgggactcggcttggacatacgctggaaaagtggattctctcacatagtcagctggccctgagaattgttggttttacactcagaccttggtggctttccgggttctgggggctcaggcaagagggccataggccagattcattccctgtctccaggcctcagtttacccgtgtgtaaatgtggaactaactgatttcccagggctcgggcgcctcacccgggccaggtggcgctctacccaaggggcgcgaccaaatcagtgacgtcactcggggcggggccggcaagacacgctgcggaagcctcagagggtgtctgggctcagcccggagccggcgtgtgggggcgggggctcccgggagggtctcctcacctccgggccctcctgagggctgggatgatcctgctgtcctccgcaggcgaaactgagtcagagcggggcgtgcgtgggccggaggctttacacaccaaagaagccggcgcctcctgcccaccccgggcgaatgccgggccccccactcccgcactcctcgccagtccccacctccaccccaccccacccccgaccctgcggctgtgagtcagcgaccgaccgcgcccccttggcccacttcctcctcaccttcccggggcgggcggggtggggtgagaggggttgggccctactcccccgacttccactcccgtgcgggtgggggtctcgcccccttagtaacctctccgaaattgacagaagagaaacgctggggaggggcggtgttccgaagatgggatttcagggagaaaatctgagaccacttgcttaacttgagggtcctcctcgacccccaaaattgagcggagtacgagatggagaagtcgatggggaaagaaatcgcgccccttccgagaccctcctcagaattcccacagtgggagcgaactaggaagcaagggaggtccccttccccttcaccaacttgcccctcaggtgggggtgattcccagggtgcacccctgggctacaacattggggagaggagcgagatcgcggaagccgagggtgcagagttgcccttttaagcgccctccaccccctcgcctggaggcgcacgcggcccctttaaggcgcggggcattgtgggtgcggggagtggaattttggaacgaaatgtaacgaagagaagtacagtagtaagagtaacactgtagccgccaccggcaaggggtgcgcgctggggagcggacgctgcatcccctttctgctgcaggaacctctcatcagaccgcctgagggaagcggcgcccggagacccgccccggcccggtccacattctccccaggaagccggactctatggggcgggaccctgggggagcctgagccgagcccggagccagccccgaacccctgaacctccagccaggggcgccccgggagcagccagcccgtgggcgagccgcccgcccgccgagcagccatgaggtgagccggacctgccccccgacccgtccccgcccgggcgggctccgcgccccgcctttgtccccctcccccccagctagctccgggctggaatttggggacagatccttgggagcctcggatttgagctgaatccccttggacgcgccccagaaccgtcgatcacttctccacgactgactccccaagctcggggggtggtggcggtgaggttctcctgggagccctcaagatttgggggcgctcggaggactcccgaattgttaagactttttttagaggacctcaaagttggcagcgactccccgcagggatgccaggattgaggcagggctcagactctcctccccctccccccagacttcagctcgaggtccgggaaggattgtgggggaccgatttgggataccctgggacttggaagagagactgagactcagaccctgggtgtgcaggtcccccgtttacttggtgctggaaaaagtctccccaagtgggaccgcgctccataacttcgggggtacttcttaatcccctggattttgggggtcacttaggtcttcctgtggaggaggctggtgtgaaccgatccagggacctggacgcagcctccagagtctggtgggaccccccccttccccgtcgctccgcacacaatctgcttaactggccgtgcctaggaccgagcgggcgctcggagcagagggcggctccccgcctccggccataagggcggcccggctcccccacctgcgcggccctggagagggagggggcgcggcagctgggggaagggggcctttgtcttcctgactcacctgtcgagacagctggtgtggggggcgggcaccaagcgctgtaggccggctgccttccccaccacggcccctccccctttgctcaccgtccccctatccacccggagccttggggttggaggagggggagctggaaagcttcaaggtcatagccctcttccctagggacccaggcttcccagataattccagctatcttcccaggaatttaatcctgggggtggcggcccaagggacccagggatttggtctggccggggcctcccccgaactcctgggctcacctgagggcggggccagtgtgggcaggggggcccaaccatcccccctattcttccctcccctggccccccataatctctcccatggggccagagcctgacaatactatctcccttcctctactctctctgggacttcctgccccaaagcccccagcctgagcagggaggcccctggggacggttggggattaaccccgtggtgcccacatcccccgcatttcctgaacccctgccctttgacatcggagtggcgtggcattcctttttatgaccactagagaatccccctcccgcgtttgttccttctgatgtgaaaggcatggctggaaaatttggagcaaggaggacacccacagataccctcaagacttcctgcctatccgctccccattatagcaacatcccttccaagtccgccctggagaggggtcagtttagggagcgtcgctctcttccttcgccctcttcctccgggactcttctctccccttgccccccagccccgcccctccaccccccctcgcgtttccggtcccaggctcggtggaaggcggatggcggatgtccgagttagtgctgcctcactcactgcaaccgtaaaagggcaggagcggtgtctgggccggccccctgtcctccccaccaccaccaccaccaccagcaccagccctggaagccctggccctcccacaaggcccacctcttgctgtggtggtggccaagcatcccgtcttgtgggggtgctggggtggggtgcggtgcagaaatgaccagatgcctgtcccaccaaaaggccactcccacctttccagggggtctcccctgcaggtggtcacacccgacttcctgggctgtgcctcttctccaaggacagccagaattcaaaacccatgcccctattacccagctggggaaactgaggctcaaagagaaaaagacatggccaagatccctcagaaattcctaggcaacgttggaggggtggaggagcctaggatcctctgatttctggctggtttggctggggacagtcctgggggcagttggaagagaggatgttaagatggaaaattacaagatatagttctttttctcccagtttgacaaatatttgttgagtgttggctgtgtccgggactggagctggggtgctgggaagacagagaagcgaggcagaggtctagaatctcagggcagaagggacttggggagaactggggtccatttctttcttcttccaataatagctatttttatttttaaaaaataagagaccatttgatcaagcatctattttatgtggggcatttttgtgcctgacagcaattctggctggtttttttgttggtttgtttgtttgttttgagacggaaattttgctcttgttgcccaggctgttgtgaaatggcatgatctcggctcactgcaacctccgtctcctgggttcaagcgattctcctcctcaaccttccgagtagctgggactacaggtgcctgccaccatgcccggctaatttttatatttttagtagagatagggtttcaccgtgatggccaggctggtctcgaactcttaacctcaggtgatccacccgcctcgacctcctaaagtgttattattacagacgtcagccaccacacctggcccctcatggcagttcgaacaatgatactattacaaccttgtggcctccccaccccggtactcagtttatagatggggaaactgaggcacaggaaagttaggcaaggtgcctattaaactcaaacagggccaggcgccggggctcatgcctgtaatcctaacactttgggaggccaaggcagaaggatcgcttgagcccaggagtttgagaacagcctgggcaatatggtgtaaccccgtctctacaaaatatacaaaaattagctgggtgtggtggcatgcgcctgtagttccagctactctggaggctgaggcgagaggatcgtttgagctggggaggttgaggccgcaatgagtcatattcttgccactgcactccagcctgggtgacaaagtgagaccctgtctcaaaaaaaaaaaaaaaatagagataacatgctttccgtgttcttaatgaagaaaaagaaaaaaaaaaaggaacgtgctttcactgtgaaaactcttaagataattcagataagccaaatgaaaccgaagctgcaacatttatcttcctattcacttatgggaaactgaggcccaccaggaggaagggactagagtagccccatccccgacaaaagaagatttgtcgtttggaagggtggtgtatatgtatcataggttttatggtataaggagggtatgggctaagtcttgggttcaggggacagtgaagggaagggtaagactgcaagttttgtgaaaaccggattcaccatgcttgattacctctggtgatgggaagctctctccttcatgtggagcgtgtaccaagttacagttcctgcgtttagggctttttgtccattatctcttttaatccttacaatgaacccagtgagttattgtttccagggctggaaactgagtttcagagaggcaaagccacacaacaaggaggcaacttgaaccgtcttttcatccgccatgtgctagagttttccaaaatgtggggacttgcagggaggagtgggtcctgggctggctggaaaattaaagtgttctcatgtccaatggagggttctagacttcgggaaaacacactggaaatgggcagaactcctttccatctcacagcccccgcacccccgttttatggctatgggattttcgttctggcttttgtgtagtttacagttttatttattgaacttaagtagtgagttaggtttttataggtaatttcaacccatgataagaaaacaaataataagcagtttgaaatacttactgaaattattgaaatggtggctgggcctggtggcttatgcctgtaatcccagcactttgggaggtcgaggcaggcagatcacctgaggtcaggagtttgaggccagcctggccaatgtggcaaacgcccaaaccccatctctactgaaaatagaaacattagcctggcgtggtggcacacgtttgtaatcccggacactcagaaggctgaggcaggagaatcgcttgaactcgggaagtggaggctgggaggctgaggcaggagaattgcttgaacctgggaggtggaggctgcagtaagctgagattacaccactgccagcctgggtgcagagtgagagactctgtctcaaaagataaatggtacaaaatatttgtttcttccctccccagttcctgagttcccctcaatggaggcagccacagttagtgtcttgggaaacagtctctgcatatatcaccactctgagtgca[137 bp omitted]cctcctgagtagctggaattacaggcacgcgccaccacgcccagcaaatttttctatttttagtagagacagggtttcaccatgttggtcaggctggtctcaaactcctgacatcaagaggtccgcctgcttcggcctcccaaagtgctgggattacaggcttgagccactgcgcctagcctaccttttttgtttgtttgtttttgtttttgagacggagtcttgctctgtcccccaggctggggtgcagtggcgtgatcttggctcactgcaacctccgcctcctgggttcacgtgattctcctgcctc[131 bp omitted]cttggcctcccaaagtgctgggattacaggcatgagccaccgcacccgaccttttttttggttttgtaaagcctctgatcaacactaccttgtactttggcttttaaaaatttcaatttagctctgcttcttcatctttaaatgaagttaagaacttgtgggaacttcgtttcaactatgagcccctctgcttacttgctgtgtgatctggggcaagtgccttcactcctctgtgcctgcaattcccccttgtcaaaagggtgagcgtcagagcctatcccatgaggttgtagagtcatgcagcagggaaattggtgtcaagcaccaagaagagtgtctgggacccaggctgactgagaaatgttaggtgtcctaggtaaaagtttgcctttttttgtgagggagtcttgctctgtgagggagtcttgctctgttgcccaggctggagtgcaagtgacctgaacaaggctcactgcagcctcatcctcttggactcaagtgatcctcctgcctcaccctcctgagtagctgggactacaggcaagcgccaccacacccagctaattttaaa[142 bp omitted]tgggttcagtgattcccctgcctcagcctcctgggtagctgggattacaggcatgagccaccatgcctggctaatttttgtatttttagtaggcatagggtttcaccatgttggccaggctggtgtcgaactcttgacctcaagagatccacctgctttggcctcccaaagttctgggattacaggcataagccaccacacccagc[137 bp omitted]tccctactatgtgttggacgccattctaggttctggggacacagcagtgaacaactgggacacaaatttctgcctttttggcagcggagacagacaaatattgtgttgggcaggggtcactgctatgaaatgtgcagcaggggatgaaaaggagagaagcgtttccagctaagggagtgagggacggcttcttggaaggggtgacatctaaggagagacctgaaagtggggagaggctaggcctgaggaagaagcagcacacaggcccgaggcaggaatgtgtctggcctgcgggaagagcagcatgggggtaggaggtctagggtctggaacagagtccccaagggacagtggagcgggaagaaatgagatctgaggacacacagatcacggaggccctggagagaacttggcattgattccgtaggagcctggagccttcaagaagaagaagagacatcccaccttgtaggtttttgttagtttgttttgttttttagagatggggggtctcactgtgttgcccaggctggtcttgaacttctggactaaagcaatcctcccgcctcggcctctcaaagtgctgggattacaggcatgagccaccgttccccgccccacctcgtgttttaacaggatccttctgttacaatgggtatagtgttccctggagaggggcaagaccaccccttggtcacccagcaggcgccctgttctccggccagtccagagcctcagtagggcagggctgcctgggagagcaaagtgcagccagggcggggcagcagcagccccgggctcctggccagagtcggccctgggtgtgggtggcaggtgtgggtgaggccgaggccttaaccctgccttgccaggggcagcaggagccagaaacagcccccgaggctgtgtttgtctggaaagggcacctggtgtttgggtggggcccacacagttcccggtggttaaggcttggaagcctgaattcacatcttcactctattcctcagtagctgtgtgactgtgggcaagtcactcaacctctctgggcctctagtcctcacctgcaaaattagaatgagtggctctctggataagctgcagtgagaataaaatgagtgactttgggggaggggcttaaggcccctgatccacctgaaatgcctagtaagagggagatggcacaattaggtaaatttgagggtccctaccccaggtccctacccacagctgagtctgcctagggactttccctgccctgacttcccagcatcagtgtcacacccagcccccagccctcctagagacagaggctttgcggggggtgtctaatttctgtccccggaaacctctgaccaccaacttccccatttcaggaaaaagcctggtgtgggtggggtggggaggagaccagtgcttccccttcccctgtgtgaccttgggcaagtcacttcctgtttgagttcctgtctaggcctgagtttcctcactgggggagaggggattgaacctcccagaggggctggtgggagggtcccgagggttgtagctgtcccgggccccagtggtgcccatgagagggatgttgacagttactgagctctcggcgtgtgctggacgctgtaccaagcacttagctttttttcttttttttgaaacagagtttcactctgtcgcccaggctggagtgcaatggcgtgatctcagctcactgcggcctccacctcctgggttcaagcgattctcctgcgtcagcctcctgagtagctcagactacaggtgcacaccaccacgcccagctaatctttgtacgtttttgtagagacgggatttcaccatgttgcccaggctggtctcgaacacctgagctcaagcgatccattcacctcagcttcccaacatgctgtaattacaggcgtgagccaccacacccggctgtaccaagccctttaggtgcccagattcatgtgcccctcccccactgccctggaggtggggactgtcattttcccagttcacaggcaagaagaggtcttgagtgggaaggtcatgtgcctgagtcacatgaagtaggtggctcagtggggatttgaacccaggtctggggatatcagctcctgaactctgcaccagtttactgacacctcccacccaggctaagtcagacgttgccttttccaggaagtcctgcctgactctccaggctggggcaggcgttccttcagggtacccccagaccctgggctccttggtcctaaacctgggttggtaccgtctggggacagctgtgtctcccacactggactgtgagccccaggagggtggtgccggagctgtctgggtcactgctgtgtcttcatccccagccccacccaatataggccagacacagagcagggagtatctggggaatggccgctagtgccctggggagccaggcgaggggtgggcagcgggaagtccctttggaggaagagctcagaggtctgggatgggtccccaacctgctgcaggcctcacacttcccctcccaagcctcagcttcttcctgagcaggcagtggtggaggggggtgcgtagagatagggaaactgaggtcaggcaggggctggtccctagtgcagctctgggctcttggcctccttctggcccctctgtcttccctcctgccctctgctctgctaacccgcatccccccactggcattggcctcggcctcttacacccctcagcctgtctctccatctttatcttttccttcttattagttttgttgtgttgtgttttttatttttcattaaaaaagtttttttgtggactgggtgtggtggctcacccctgtaatcccagcactttgtggggctgaggcaaatggatcacttgagcccaggagttcgagaccagtctggccaacatggtgaaacctcgtctctactaaaaatacaaaaaattagctgggcttggtggtgcatgcctgtgattccagctactcaggaggctgaggcggagaatggcttgaac[135 bp omitted]ctgaagtgggaggatcgcttgagctcaggaggtcgaggccacattccaacctgggtgacagagagcaagactctgtctcaaaaacaaaaataaaaataataataataattattattattagagatggggtctcactatgttgcccaggctgctctgaaatgcttgggctcaagtgatcctcctgcctcaacctccaaagtgctgggattacaggtgtgagacaccacgccaagaccatctttatctctttctgtgtctgcctcttcctccaggtcccctgtctgcccatcctttttccccacccctcccccatctgttcatctgtctgtctgccttcagtctgtctctcctctttgtcaacccgactctccctttcccacctctctctgcgtctgtctcttgcatctcgtttgtgtgtttgcctgtctctcctgatctgattttctctcctgatctgtctcccccgtctccttctgtccacgtggctcctgcctccctctgtgtcactctcttccttccacacactgtctttgtcccttggaatctcccaggagagacccagataagaaggtgaccggcccctctcccttttcctcccgcctgcagcgagacggtcatctgttccagccgggccactgtgatgctttatgatgatggcaacaagcgatggctccctgctggcacgggtccccaggccttcagccgcgtccagatctaccacaaccccacggccaattcctttcgcgtcgtgggccggaagatgcagcccgaccagcaggtgcagcttcccgccggccccctctgtgggctgaacccctacccgccccacccctgcgcccgccgcccctcacccccctttcccctcccaccaggtggtcatcaactgtgccatcgtccggggtgtcaagtataaccaggccacccccaacttccatcagtggcgcgacgctcgccaggtctggggcctcaacttcggcagcaaggaggatgcggcccagtttgccgccggcatggccagtgccctagaggcgttggaaggtcagaaatggcggcgggcaaaggggaccagtgaatgcggctgtgtggcctggggctgccgctttaccctgctgggacttggtttactcgtcggtaaaatagagcgaattcattgttatcatggaaaattatcactagcattttgtgcattccagtgtgaccgtgtgcacctatgtgtaaaatgcaccattggcccggcgccgtggctcatgcctgtaatctcagcactttgggaggccgaggcacacggattacctgaggtcaggagtttcaccgtgcccaacatggtgaaattgcgtctctattaaaattcaaaaattagctgggcgtggtggtgcgcgcctgtaatcccagctattcgggatgctgagggacgagaagtgtttgaacccaggagatagaggttgcagtgagccgagatcaggccactgcacttcagcctggcgacagagcaagattccgtctcagaaagaaaacaaacacaaaaaaaatgcacgattactcagggatcagtactccatgaactttacacaggcacactcccgggaaaccacctcccagatcaagacataggtaggtcctgccccagaaacaggatctcgctctgttgcccaggctggtgtgcactggcacaatcatggctctctgcagccttcacctcctgggctcaagtgatcctcttgcctcagcctcctaagtagctgggaatacaggtgtgcaccaccatacttggctctttttttgttttgttttttgagacagagtcttgctctgtcacccaggctggagtgcagtggtgcaacctcagctcactgcaacctccacctcccgggttcgcgtgattctcgtgcctcagcctcctgagtagctgggattacaggcatgtgccaccatgcccaagctatttttttgtattttgtttttatttttatttttttgagacagagtctcactctgttgcccaggctggagtgcagtggcacgatattgcctcactgcaacctccgcctcccgggttcaagcgattctcctgccctagcctcccgagtagctgggactataggcgtgagccaccacacccgggtaattttttgtatctttagtagagacaaggtttcaccgtgttagccaggatggtctctatctcctgaccttgtgatccgcccgcctaggcctcccagagtgctgggattacaggcatgagacaccatgcccggcccttgtattttagtagagaaggggtttcaccatattggccaggctggtttcaaactcctggcctcaagtgatccacctgcctctgcctcccaaagtgctgggattataagtgtgagccaccatgtctggccacctggatcatttcaaattttttttttttttttactttttgtggagatggtctacaggctggtcttgaactcctgggctcaagtgatcctcccacttcagcctcctaaagtgctgggattacaggcatgagccactacacccagcccagttgctttttttttttttttttggagacggagtctcgctctgtccccaggttggagtgcagtggcgcgatctccgctcgctgcaagctctgcctcccgggtaaatgccattctcctgcctcagcctcccgagtagctgggactacaggcacccgccac[138 bp omitted]cccggccttttttttttttttttttttttttttttaatatggagtctcactctgtctctcaggctggagtgcagtggtgtgatctcagttcactgcaacctccgcctcctgagtttaagcaattctgcctcagcctcctgagtagatggaactataggtgtgcaccaacatgcctgtctaatttttgtagttttagtagagacggggtttcgcagtgttggccaggctggtctcgaactcctgacctcaggtgatccactcgcctcggcctcccagagtgctgagattacaggcgcgagtcacgcgcccagcccagttgctatttcttaaaccttaacgtgcacatgaatcacctggggatctggttaaagtgcaggctctggtgcaggtgggctgggcggactgagactccacattctcacaagtgccctggtgatacccaggctgctggtctgcggacgtgactgagtagtgaggttttaggtgactgccgtgcatctggcctggaatcactgctgtagaactgaaagtcaccaaatgcaggggtgtttgcttcgtgggacaacttctgtgctagtgcggaaggggcttgctcctctggggcacacagaaaaatacagtgggcttcagttgagtcatctgtaaattggggctaattcattgttaattcgtagccaattcaattcaggtgctagggccagaggcctggaggtaggtgaggaagaagctctttacctttccaggttcttaggtaaggtccaagtggctgtaacagtggttaagagctagccaggggccaggtgcggtggctcacgcctgtaatctcagcactttgggaggctgaggcaagtggatcacttgaggtcaggagttcgagaccagcctagccaacatggtgaaatcccatctctattaaaaatacaaaaattagccaggcatggtggcaggcgcctgtaatcccagctactcaggaggctgaggcaggagaatctcttgaacccgggaggtggaggctgtggtgagccgtgattgcactgctgcactccagcctgggtgacagagtgagactctgtctcgaaacaaaccaacagtggttaagagcctggctgctggaatcagcctgaattcaagtcttgttcctgcacattccaccctggagaaatctggggcaagtgactgttccccgggccttagcttctcctgtcactgggacatcacaacagcacctaccttagggcaactcaggccagggaagttggtgctgcctcacctcccaatgtgcgtcctcctgggcctggagcctcagggcctctggaaggaggaagtgagcgcctctgggcaggattcctgggaggcctgggagagcaagggaagcgccaagagctgagcagagttctgggactgatccatggccctttctctctcacctttcaggaggtgggccccctccacccccagcacttcccacctggtcggtcccgaacggcccctccccggaggaggtggagcagcagaaaaggtggggctgggccctgggtggggaaccttagccgctgccagagttccatatgttctggaacccttgactcctagagttcagaacccagccaacttgcagttttcagaatgttcaagaaacttctgacactcagagttgcagaacctcctggtccctgcagattcctggaaatcagaatatggtggttgaaagaatcttgtggctgggcgtggtggctcacgcctgtaatcccagcactctgggaggccgaggcgggcagatcgcctgaggtcaggagtttgagaccagcctggccaacatggcgaaatcccgtctctactgaagataacaaaaattagccggtcatggtggcgcccgtgcctgtaatcccagctcggcaggccgaggcaggagaatcgcttgaacccgggaggcagaggttgcagtgagccaagatcgagccactgcactccagcctgggtgacagagtctcaaaaaaaaaaaaagaaaagaaagaatcttgggcattttgtaattcggtgttcctgacagtttagtgactgggatctcgcatcctgatctctccctgtcgctgccctgccctccattccccctactctcacccagcccccttcttggttccctaggggaggaaggcttgggtgagtattaggagccagccaccctggagacctctgagagagaggacggaggtcgctggccccttcgctggccatccttagggccctgattgacggcagctctctcgcctccccccacaggcagcagcccggcccgtcggagcacatagagcgccgggtctccaatgcaggtgatgctcagatagcttcgggagttgggagggggcctccctggaggaagtggccagccagctggacagtgaagaatgaggcttctctctctcagctgcccccttttctgtgtttgtttcaggaggcccacctgctccccccgctgggggtccacccccaccaccaggacctccccctcctccaggtccccccccacccccaggtttgcccccttcgggggtcccagctgcagcgcacggagcagggggaggaccaccccctgcaccccctctcccggcagcacagggccctggtggtgggggagctggggccccaggcctggccgcagctattgctggagccaaactcaggaaagtcagcaaggtgaggggccgggagaggtgggcagggggcaacagggcttttatgggggatgaggccagggctgccggcggtgtcattgggctggaaggccaaaaggcctgcccctaaagctcctgccccttttaaatttctccagcaggaggaggcctcaggggggcccacagcccccaaagctgagagtggtcgaagcggaggtgggggactcatggaagagatgaacgccatgctggcccggaggtgagcctgagcctggacccccaagtcacctggagttccagttcagtagggcccagtcagaggagggctccaattcctgtttagtttgtttcttttggtgaatgttccccctttgataaccaggtttgggatataatggtggggtttgtcatgaaatgcctgaggcttgcaaccacctaggtagcctgtagatgttctaaaacccagaattctagaaccgtaggagatcctgcctcagaattctgggaactcaggttcctgcaatctcagtgttccaacacagcaccgctccaccctcggaatcttactgttccctaatataagaatcatagaacctcctccaccctgattctagaaccacaatctcttgaattttttttttttttttttttttttttttttgagatggagtcttgctctgtcacccaggctggagtgcagtggtatgatctcggtccactgcaacctccgcctcctgggttcaggcagttcttctgcctcagcctcctaagtagccgggattacaggcatgagtcaccacacccggctaatttttgtatttttagtagacacaggatttcaccatgttggccaggctggtcttgaactcttgacctcaagagatccacctgcttcagcctctcaaagtgttggcattacaggccactgcgcccagcacaatctcttgaatttctaaaactagagtttccttaggttttcggagttccagaattctatgcgctaggatctacatttctagaactcccctcagaaggggatgggttgggtgacggaagcacgtgtttttgcttttctctcctgcagaaggaaagccacgcaagttggggagaaaacccccaaggatgaatctgccaatgtaagtcagggactcttcttgccctacatctcttaggccgtaccatgagggtagggatagtgggatgtgtggggtttgaacctgaaagaggaaatgggcagaggtgtggcaggggctggctcatggcagttttatttcctaccagcaggaggagccagaggccagagtcccggcccagagtggtgagtagagtgcccagtccagccacaggaactacaaatcccagaatactctgttctcacatgttaagcacccttataggagagtcagggcgaatggtgctggggattgtagtctcctgagatggggctttgatcaggggctgatgaggttgggggagtaagattgattggggggcagtcttttgtccctgatctttctgatttcttgcctatccccagaatctgtgcggagaccctgggagaagaacagcacaaccttgccaaggtaggccatcggtcctggggcccttggggaggtaaaggcgggcagatcgcttgagcccaggaggtcaagaccagcctgggcaacatggcgacaccccatctctacaaaaattagccaggcgtggtagcacttacctgtggtcccagctactcaggaggctgaggtgggaggattacttgagcccaggaagttgaggcctcagcgagccatcatcatgcctgcactccagcctgagaaatagaatgtgactgtctcaaaacaaaacacaacaaaccaaaaccaaaaaaaaaaaaaactggggccccaaaaatacttggacttgcccaatttataaggcagagctcaatgtgacccctggaataggaggcggggaagcaggtcctctctctaatctcattgctgtcccaaaccacaccaactcccccaggatgaagtcgtcttcttcggtgaccacttccgagacccaaccctgcacgcccagctccagtgattactcggacctacagagggtgaaacaggtaacttgggggggaagttggggaccacagcaagagagatctaggtctggcccctgccactggcatgccgtatgatcctagataacatctcagaaacctcaggtttccaatctgacaaatggagaaactggattgggtcaaggatgaccgagactccacacccccttttctggcacctgtgacagacattattaatctatcaccgcgctcattccagatgagtgccttgaattctttccgcacattgacccagctgtccatcaccaattggagttggcaggaggctggaatgcgcttgccaaccttggtactggatgttctccagtacttttccggctccaaggatccagaattctcccctagaatcctccagtcactctgcgaccttgacagcgatgtcatggtgtcgatgtaggggtaggtctcaaacctactacccctggcttttccatcaacaagaaagaggggactctggcagggcacggtggctcatgtgtgtaatttcagcacattgcgaggctgaggtgggagcattgcttgaggccaggagtttgagaccagcctggggcaacatcgggagacccccatctc[132 bp omitted]tgaaacccatcgctactaaaaatacaaaaattaggctgggaatggtggctcacagccataatcccagcagtttggaaggctgatggggacggatcacgtgaagtcaaaagttcgagaccagcctggccaacatggcgaaaccctgtctctactaaaaatacaaaaattagctgggccttgtggggggcacctgtaatccagttatttgggcggctgaggcaggagaatcgcttgaacccgggagccagagattgcagtcagccgagattgggccactgcactgcagtctgggtgacagggagactctgtttcaaaaaaaaaaagaaaaagaaaaagttacctgattgtggcggcaggtgactgtggtcccagctacttgggaggctaaggcaggaggattacctgagcctgggaagttgaggctgcaatgagctgtgatcatgccattgcaccctagcctgggcaacagagcaaggttccttctcaaaaaataaaagaagggggattcattcctgcaagtcccggtaccccctcctgattagttttaccccattaattttaggagcttctggaagaggtgaagaaggaattgcagaaagtgaaagaggaaatcattgaaggtgaggtggtttgctttggttttgttcttaaacatttacttattttggaggcatcatgtccctgggcaagagccctgttttggaagggaggaggcagagactctgcccctgacctctgctccttgtttccttccagccttcgtccaggagctgaggaagcggggttctccctgaccacagggacccagaagacccgcttctcctttccgcacacccggcctgtcaccctgctttccctgcctctacttgacttggaattggctgaagactacacaggaatgcatcgttcccactccccatcccacttggaaaactccaagggggtgtggcttccctgctcacacccacactggctgctgattggctggggaggcccccgcccttttctccctttggtccttcccctctgccatccccttggggccggtccctctgctggggatgcaccaatgaaccccacaggaagggggaaggaaggagggaatttcacattcccttgttctagattcactttaacgcttaatgccttcaaagttttggtttttttaagaaaaaaaaatatatatatatttgggttttgggggaaaagggaaatttttttttctctttggttttgataaaatgggatgtgggagtttttaaatgctatagccctgggcttgccccatttggggcagctatttaaggggaggggatgtctcaccgggctgggggtgagatatccccccaccccagggactccccttccctctggctccttccccttttctatgaggaaataagatgctgtaactttttggaacctcagttttttgattttttatttgggtaggttttggggtccaggccattttttttaccccttggaggaaataagatgagggagaaaggagaaggggaggaaacttctcccctcccaccttcacctttagcttcttgaaaatgggcccctgcagaataaatctgccagtttttataaatgctaagatctctggagtgatttgaaggcctgttctgatggggatggaggtgtgctcggcccccggtgcccctccaggaagatttggtcctctgctgagaacccctgcctcctcccaggaatccaccttcccttcatcttccttcccaccctgcatattgcgcctgctcactcatcctcaggcccgcagccaggatgatctctgccccctccagcctccctccccatgccccttaggaggccacttcctccccatcccaccctgcccttcaccaccctaggggaggccagaagcagcctcactttgtgtagccttgggcaagtccatttgcttacctcaggcctcagtttctgatttgggaaagggctcataagatgattctctgcccccactctaccactctcccagcttctttcctctttttttttttttttttttttaatgagttggagtcttgctctttcacccagtctggagtgtagtggcaggatcacagctcactgcagccttgaactcctgggctcaagggatcctcctgcctcagcctcccaagtagctggaactacaggcgtttggtatgacgcctagctaatattttcatttttcgtagagatgcggtcttgctgtgttgcctaggttggtctctaactcctggcctccagcagtcctcctgctttggcctcttaaagtgctggaattacaggcgtgagccactgtgtccggccttctttcctaatttcaatgacattttgcagacgcacattatggttctcagacacgttcttaagatctttaccccagagctcctttaattagaaaacgctgacagtcgatttataaagtagcattcagagtcacagagctcatccacgcccccttcagttgtcgggtgggtaggtcatatggcctggtggaataccccgcttggacagggggacctctgggctgagggacaggtagtccccctggaggaggcctttgcgtgaaggagggcggaggaggacctggaccagtccaaaggcaggaaggaagggcgatccctgcgtaccgtgaggggcagatttggagggaagttgggcgaactgacgatgacttaggtagtaaagggacaggccggtccctagcaaaggcaactgaagaggacagcgagggaggaccggataaaaggacagtagcagtaggtccaggactggggactggtgaccaagtgactgagcctgaaagccagaatggactagccctggtcaagaccggtttttcctcccaaaaggccacgtcctgctggaacagaccacagaatgccgggctgggaggcgtttccctggaagacccagcatagccatgccagtggggtgcgccataggtggaagaagaggggggttatgttggatcgatccactcagggaggggaggatgtcaatgacaggtactaagatggattaaggtcaggagccgcagggtggtgactcattggagctaacgcagtccaggattcacccccacctttccccctaagactgaggtagatggaagggggcgggtcgggaagtccgtaggaactttgtgcatctttacaatggtctgtaccaatgaggaggaggtaggtggtgttcggtgcaaaggatgagcgtcctaggggaagggtccactcaggtgagtgagggtgcgggtgacagaatgagaggtggctaaatccgggtgcagaattttgttttgccaaaagaggtggacgtcctgctggcctacctagcggtagggaggtggggtctgataaaagacgctgtctttccaaagtgctcaacaaatgcgctggcaggggcggggtgggatagggcggggtccttcttggaacgttccacctgcaggaggcggagagtcccagtggaaggtaccactgggcaggttagtagggaggttcgatcagctccagcccaggatctctccggcgcccccgaaggactgggtggtgtcagctgggccggtccaggatgggacagtgcggagaataggccaagacagagacttcgcagtccagacagcagtcacctccaagaccagggccccgagacctcctatttctcggacgccggcgcaactgggggtgcaggcggcgggtctcggaggcagaggtgggctcgcacctcctgcagctgagcgcgcagctcctccagggcgagctgcgtcgacgtcgcctgcacctgcgcctgcaactcctcgagcgccagccccaagtggcccacctcgccccgcagcgcctccctggcaacacgtcgctccttttccttgcggcgctgctgcaactggtggcgccaatactccagcatcaggcagctgcaggcggtgatgaagatgatgccctcgcccagcagctccgcgcccagctcggcggctgcaccctcgttcagcggcttgatggcagcggcattgaaacccatgatgcgcattttggtccgcatctccagccagtggtacactgcaggaaaagacaggagtcaggggtcttttgcagggcagcctcctataagccccgaccctctgtgcttcgatgtccccgttgtagcaatggggatgtggtcaccacaatcggacgcgtgctggcggggacgccttaacgaagacaagtgcaggcctcacacccagaatcctctagggaaaacttccttaactaatgacttactcatgtgaaggtggagtgtcagcttttgcatcgttataaacacagaagatgctgatgctctttttttttctttaatttttctttttttgagccagggtttcgctctatcgtccaggctggagtgcagtgccgaaatcacagcttactgcagcctcgaactcctgggctcaagcgatcctcctcccgcctcagcctccagagtagctgggacaacgtgtgcgcgccatcatgcctggctaattttttaattttttgtagaaatgggggctccttgcgttgcccaggctggtctcgaactcctgggctcaagcgaccctcctgccaaagcctcccaaagtgctgggactgcaggtgtgagccacggagcgcggccctgaggctaactcttaattccatcaataattcatacttcgctgggcgcggtggctcatgcctgtaatcccagcactttgagaggccga[133 bp omitted]gaagcaggagaatcgcttgaaacagggaggcagaggctgcagtgagccgagatcatgccactgtactccagcctgggagacagagcgagactccatctcaaaaaaaaaataaaattgtaacttgatttttcactgcactccccctcaaccccatgaactatatggaattcatcacatattctatctccttccctctcccctcccaatttttacaagtggtttttatttttttactgtttatttttatttatgtatgtatggtttttttttattgagacggggtcttgctctgttgcccaggctgtagtgcagtgacactatctcagctcactgcaacctccacctcccaggttcaagtgatttccaactaatttttgtatttttactagagacgggttttcaccatcttggccaggctggtctcaaactcctgacctcaagtgatccgcctgcttcagcctcccaaagtgctaggattacaagcatgagccaccatgcccagcctttatttatttatttattttcgagacagagtctcggtctgtcccccaggctggagtgcagtggtgtgatcttggctcgctgcagcctctgcctcccagattcaagccattctggtggcttagcctcccaagtagcttggttcaatggcgtgtgccaccatgtcacctactttttttttttttttttttttttttttttttttttgcattttagtagagacagggtttcactacgttggtcaggctggtctcgaactcctggcctcaagtgatccacccgcctcagcctcccaaagtgctgggattacaggcatgagctaccacacccagcctatttttttttactgtttattggtaacctatgtaattgctttgtgcaatgctttgtgctgcctgaaattgaaaatatagaccatgtaaaatatggaggttatggaaatattaatcctgtagatccataatgaagatgtatttttatttcactaaaccagtggcatgtgaagcattatcattaaatgccagctggactcactgcttcgtatcgtgccacattttcattttcttttatttcaactttgacgttactgtatgaaggttttagtttttcctagaatgatgattctcaaactaactatgtgacccacaaaaatttaccatgggaccaagatcatccagatgtttgctcctattctgtttattaaataaacagttgtggacacactagctgttctctgggctgctgcaggactgtcctccttcatactgctcctcctcttttgaggaacttgcatcctctttgttgaatttcattctagttttcctggagtatatccctagataccttttgcagaaagggtgcttggtatctcagtgttttgaatccttgaatatctgaaatatctttttccaccttcacattagatgagatgataaattctagccccagaatgactagttcgaaatcctattcctcagcagtttggtggcctggttccacgatgtgtaaaggcagaggggcttgttgtcatccctgtggcactgacattgcaccaagatgaatgtttttcttattccccttaaactcttctatcttctatccaaatcccgtttctctctttagcccttcgaatttttcttgtctgctcagtaaaggattaacttcatccaaatagaggtctgacctttgccttttactcctgggaggtaattttttagttcttggaatgtccagcctgagtttacatggggccttgggccacaccatatggtttgtgctaacagtggtgatttatggtgggggctttgggccatgtgatatcagcttaacctctggaggggctagaatctaaggggagccacacaagtggtcagccttatccacatgctgatccctattaaaaaccctggacaccaaggctcaggtaggcttccctggtgggtgacatcatgtcacttatcattgctgggagaagttagtgctgtccacaactgtaccaggtattaaattggcacttggaactctcctggacccatggacctcttccctgggctgcttttaatctgattcttttcactgtaatgagccacaaccatgagaataactgatcctagtgagttctgtgagtctttctagcaaattactgaaactgatggtgatcttagagactcctgagcttgcagtcaatgacagaagtgagggtggtcttggtgaccccctaaatgtgtgtcttatctgttgcctcctctccattttctcctacccttctcctaccccttcccagtctggaacgccaccctgcactgatctcctcactttcccttcctgtttttttccattgctcctttttgttacaccactgggaggttttgttgactttcagaacttattttttccccctaattttcagtctttatttaaaatttgattataaaatatccaaacatacagggaagtttagtgtccattcggctttaaaattattttattttattttattttttaatagagatggggtctcactatgttgtccagccttgtctcaaactcccagcctcaagcaatcctcccacctcagcctcgtaaagtgctgattgcaggcatgagccactgtgcccagccctaggatgatttttattttttaaattttttttgagatggagttttgctcttctcccccaggctggagtgcgatgacaccatctcggctcactgcaacctctgcctcccaggctcaagcgattctcctgcctcagcctcccgagtagctgggattacaggcatgcaccaccatgcccggatatttttgtatttttagtagagatggggtttcaccatgttggtcaggctggtctcgaactcccaacctcaaatgatccacctgccttggcctcccaaagtgctgagattacaggcatgagctactgcatctggccaggatgatttttcttttttttttaaggcggagtctcactctgacgcccaggctggagtgcagtggcgcatctctgctcactgcaagctccgcctcctgggttcaagccattctcctgcctcagcctcccgagtagctgggactacaggcatttgccactatgcccggctaatattttgtatttttagtagagatggggtttcaccaagttagccagaatggtctcgatttcctgacctcatgatctgcccgccttggcctcccagagtgctgggattacatgcgtgagccaccgcgcccagctgaatgtagctaatttttaaataatcaggagacaccttgtgctacagatgtacgttgtttccttttaccctatacctttgaggccggtacttaaacatcagccggatcctaatccaggagaggtcagttcaccagtaagtccgtactccagggcaggccaggccaggccaggccaagcttctgttggttgaatgcaaagcatggtgaggtgtgtgaattcacttcagtctcctatgggaggggccctcttggtggccctggatgggcagggtcaaggtgaaaacccagggattggtttcacaaggttgaacaagcggctccgtcctgggcaggctccatgcttctccccgaaagaaggcaccatagccaccattaagcagtgggcaggttgttgcctctgactctggcctggagacaagtcagttcagtccatgtgaattctagtatcagtttgtcagtttgcacacacatgcacatgcacaaatatacaaacacacaccttttggcatagaattgggattgacttgaatctataaatcagtttataagatgatatctttacaatattgaaccttccaattgaaggaatccacagctttggcacaaagattattttacagtgaaaacacttgtaatgttatctacactcctcttattggactaaaggagagcctcctgaaaatacaactgccattaaccccctccaagggagttttctgcgaattccaggaaggagacagactgtccatctcttttagtgttaaaaatcacacaggaaagcaatagaggccaggcgctgtggctcatgcctgtaatcccagcactttgggaggctgaggtgggtggatgacctgaggtcaggagttccagaccagcctggccaacctaattaaaccccatctccactaaaaatacaaaacttagccaggcatggtggtgggtgcctgtaatcccagtactttcgaggctgaagcaggagaattgcttgaacctgggaagtggaggttgtagtgagccaagatcatgccatcacactccagcctggtgacaagagcaaaactctgtcccaaaaaaaaaaaaaaaaaaaaagtcaagtaaagaaaacaatagaactatccatacttttccactgaacccctttttctttttcttttttttgagatggaatcttgctctgttgcccaggctggagtgcagtggcgtgatctcagctcaccacaacctccgcctcccaggttcaagcgattctcctgcctc[132 bp omitted]cggccttccaaaatgctgggattacaggtgtgagtcactgcatccagcctgaactcctttttcttaagttggtaaataaacctttacttccagctattcaatgagttactcattacagagttcccttgcctaatgtgtaaataaagtttttctttccacgtgttgatctgtctattgttaattaatttgcaggttcccaacaacagggatctagattggtagaggaaaagattttcctgtcaatgcaatccatgaacatggtattctcttcatttaggtctttaagaaatttatctcaataatgttttgtagtttacagaatagatatcttgcatgtaaattcagtttattcctatgtattagatattttgatactattttgatggcaacatttcaaatttcattttctatttgtttgttgctggtactgatgataggaataaactgatttccgtaccttatatgcagtgatcttgataaattattacttttttttttttttttttttgagataaggtctcattctgtcacccaggctggagtgcagtggtgcaatcatagcttactgcagcctcaagtgatccacctacttcagcctcctgagtagctgggactgcagggacacaacaccatgcctggctaatttttgtaattttctgtaaagacagggtttcgccatgttgttcaggctggtctcgaactcctgggctcaagcgatccaactgccttgacctcccaaagtgctgggattacaggcatgaaccgccatgcccagcctaattagttcttattcttcttagtcatataatttgtttataaattattttaattgtacatatacactttaattgtttgaacataataactgtttttttcttttcttttttttttttttttttaagagttgaggtctcaccctgtcacccaggctggagtgcaatagcacaattatagctcactatagccttgatctcctgagctcaagagattctctcacctcagcctcctgagtagctgggactaaaggtgcctgctgccacaccctgctagaaactggttttcttgccgggtgtgatggctcatgcctgcaaccccagtacgttgagaggccaaggtaggcggatcacctgaggtcaggagttcgagaccagcctggccaacatggtgaaaccctgtctctactgaaaaaattaaaaaattagccaggtgtggtggcatgcacctgtaatctcagctactcaggaggcttaggaaggagaattgcatgaacccaggaggtggaggttgcagtgagccgagatcacaccactgcactccagctggatgacacagcaagactctatctcaaaaaaaaaaaaaaaaattaaaaaaaaaaatgtgggccgggcacggtggctcatgcctgtaatcccagcactctgggaggctgaggcaggcggatcacatgaggtcaggagtttgagaccagcctggccaacatggcaaaaccccgtctctactaaaaatacaacaaaaaattagccaggcatggtgacgggtgcctataatcccagctactagggaggctgaggcaggataattgcttgaactttggaggcagaggttgcagtaagtcaagatcgtgccactgcactccactcttggcgacaagagtgaaactctgtctcaaaaaaaaaaaaaaaagtgtatggaaacacaaagggccaagaatagtaatactgaagagaaaaactggagaccttacactaccagatataaagctatcataaagctataatcatcaaaacagggtggcatttccacatgaatagacaggccagtggtaaagcgtagagaatccagaaatattcacacatgcacagtcatatgacttgtgacgaaagtgacactgtagtgcagtgggaaaagaatggactttttaagacacgttggatcacttgaatattcacagagaaaaaaataaaccttaacatctacctcacataatacacaaaaattaattccacagggattgtagatcaaaatatgatagacacaaaaataacacttttagaaaaaaaaagtaggaggctgggtgtactggctcatgcctataaactgtgctttggaaggccaaggtgggaggattgcttcagagaaggggttcaagaccatactgggcaacatggtgaaaccccatctctacaaaaaataaaaaattagcccggtatgctggtgcacctgccaccatgccaggctaatttttaaaaaactttttagtagagatggggtttcgccatgt[132 bp omitted]gctgagcgaggaggatcacttaagcccgagagttgaaggc[137 bp omitted]ggcaaatcatagactggaagaagccatttgcaatacatcaatctgacaaataactcaaatttaggacatacagatacctcctgccaatcaaaaggggaagggtagagaacctagtggagaaggacttgactcacaaaagaggatggtatctttttcttttcttttattttctttttttgagatggagtttcgctcttgttgcccaggctggagtgcagtggtgcgatctcggctcactgcaacctctgccctccggtttcaagcgattctcctgcctcagcctcccgagtgccagagcagggagggagaatgacgagactaaactgtagcttcagctttctctctttaaaaaccaaagcaaagaggacaaaatgttcatttctattaattctaagtggtgggtacaaggttattcattatattgttttctgtatgtctgcaatatttcataatatatatgttttcaataaaaattagctgggtgtggtggtgtgtgcctgtagtcccagctactcaggaggctgaggcgggaggactgcctgaattcaggaggtgcaggttgcaggttgcagtgagctgagatggtaccactgcactccagcctggaggacagagctaggctccatatcaaaaaaaaaaaaaaaaatgccacctgaaaaaaaaaaaaaaaagattctagctagctatggagtctcacacctgtaatcccagcactttgggagatcaaggtaggaggattgcttgagaccaggaatttgagggcaacatagtgaaaccccatcttcacacacgcacacaaaatagctgggtgtggtggtgtatgcctgtggtcccagctcatcaggaggctgaggggggaggattgcttgagcctggaagatcaaaactgcagtgagctgtgattgcactactgcactacatcctgggcaaaagagtgagtccctatctcaagaaaaaagcaagtgaggccaggcacggtgtcttacacttgtaatcccagcatttgtgggaggccgaggtgggcagatcacttgaggtcagaagttcgagaccaggctggccaacatggtgaaactacctgtctctactgaaaatacaaaaattagccaggtgtggtggcgtgtgcctgtaattccagttacttgggaggctgaggcaagagaattccttgaacctgggaggcggaggttgcagtgagccaaaattgtgccattgcactccagcctgggcaaaaaagtgagactccgtctcaaaaaaaaaaaaaagaaaagatgctcaacacattagttagtagagcaatacaagtcaaattcacaatgagatgccatttcccagccactggaatggctatagtcaaaacagtgaacaaccactaatgcttccaaagtttctgtattagtcagttttcacacagctataaagaaattcctgagaatgggtaattataaaggaaagaggtttagttgacttacagttctgaatggctggggaggcctcaggaaacttacaatcatggcagaaggcaaaggggaagcaggcacctcctcacaaggcagcaggagggagaagtgaaagggcaggaaaaactgccattttaaaattcattagatctcatgagaattcactcattatcaggagaacagcataagggaaaccacccccatgatcacttccctccctcaacacatgaggatgacaactcgagatgagatttgggttgggacacagagccaaactatatcagttgtagggtaacaaaactctcgcatgtcactggcggaaatgtaaaatggtgcagccactttggaaagtagtttggcagtttcttaaaaagttaaacataggccaggtgcagtggcttacacacctgtattcccagcactctgggaggctactcatcgcttgaacccaggagttcaagaccaacctgggcaacatggcgaaaccccttctctacaaaaacatcacaaaaaagttttaatatttttattttttctgccacgctcggctaatttctgtatgttttgtagagatgaggtctcactatattgcccaggctggtctcaaactcctgacctcaagctatccacccacttctgtctcccaaagtgctgggattacaggcatgaacactacacccagccaaaaaacacaaaaattagccgggcgtggcggtgcatgtctgtaatcccagctactgggcgggggtggggctgaggttgcagtgagcagacagcgcgtcactgcactccagcctgggcgacagagccagaccttgtctcaaaaaaaaaaaaaaggaatgagatattcatgcaataaaatggaccatgcattgtatgactccatttacattaaatgtcccaaataatgcaatctattaaggcagaaagtagatcagtgatttttaggggctgaaggaaggagaatggagagtcactgcaaatgaatgtgagggatcttttggagatgatggaaatgttctgaaattggaatgtggagatggttgcataaccatgtcagtttactgaaaatcat[211 bp omitted]gaggcaggagaatcgcttgaacccaggaggcagaaattgcagtgagtcaagatcgcaccactgtgctccagcctgggtgccagagcgagactctgtctcaaaaaaaataaaaaataaaaaataaaaaataaaataaaacaaagggtgagtttcatggtgtgtagattatgccttgctgtttaaacaaacaaaccaggccaggacacggtggctcatacctgtagccccagctacttggggggttgaagtgggaagatcgcttgagcctgggaggttgaggctgcagtgagctgtgactgcaccactgcactgcagcctgggtgactgagtaagaccctgtctcagaaagaaaaaaaaaaaaaaaaagggggccaggcacggtggctcatactaatcccagcactttgggaggctgaggcgggcggatcacctgaagtcaggtgggcgtggtgacaggcgcctgcaatcccagctacttgggaggctgaggcaggagaatcacttgaacctgggaggcggagaatgcagtgagccaagatggcaccactgcactccagcctgggtgagagagagagactccgtctcaaaaaaaaaacaagcaaaaaagccagaacaccggggtccaggacctctctcactggaattggcaaatgctgtcatgaatcataggcaggatgggtgggggttcacagtctctatgctgggcccaagtggatcccaccaaactcaggacctcaggaatgaatgtctgtacttctgaggtttttgattttccagcatctaaacccctctgttgcattggggaagcgccattgctgttagtctgagtcaggaacagcctgcaacagaaactggagaaacccatggcttccccatatggggactgttctcccacaaccagaaggctgccatacaatgtcactgggaacccaggctccttctcgttcaatccctaccctcctcattatggggcttttagccacatgcccaaaagatgcctgctgcccctcggcatcacagcctccttctacacaggaggtgagggcagggggtgtcagaggaagtgtgtgtctaatctgtcactttttatggaaaagccactagattttacagagcccccatgccacatagccatcctgtactataggggggtctgggaggtccattgttcttgactggatacagagtcacccctcatttaattggggcctggtgtagcggctcaggcttgtaatcccagcactttgggaggctgaggcaggaggatcatctaagtccagaagtttgagactagcctgggcaacacagggagacctggtctctactaaaaaataaaacaaaataaataagagaaatttttttttggagaaagagtctcagtctgttagccaggctggagtgcagtggtgcaatgatggctcattgcagcctcgacctcctgggctcaagcaaacctcctgcctcagcctcctgagtagctgggactataggcacacaccaccacacctggcgcattttaaaacattttatagaaacagggtctcactatgtttcccaggctggtcttgaactcctgggctcaagcgatcctcccaccttggcctcccaaagtgctgatattacaggtgtgagccaccacacccagcctgaacctgaaatcttggggaaggcttcaaggatacgaagagacccctaggatccatgttagggtgtggagtaggtccacggcagtggtagggggtggtacccatggtgctgacagccctctgaccttggagtccctgagtgcttcatgctcgctgcaacccaacagacaggctccttgctgggaagtggctgcccagccagggactatagttaggtgcagttaggtgtggtcagggcaccgagttctaggaaaaataagccagccaagtgaagccggctacttccagccctggtccatatgagccatgctgtggtcctcatgaagaccaccccagggtgaccttgaaataaacacactgaagatggcagagctgcaacagcctgagtccctgaatgactgtgtggaggagggctgccctgccaacctgttcccggctagtacagccgtgcactgcttaatgacagggacacattctgagaaatgcattgtttggtgattttgtcattgtgcaaacatcacagagtgggcttacacgaacctagatagtgtggcctgctacacacctaggctatgtggtagagctttctgctcctaggctataaacctaaacagcatgtgactgtactgaaaattgcaggagttgtaacacaatggtaagtacttgcgtgtctagacacatccaaacatagaaacggtacagtaaaaatacggtggtatcattttatgagaccactgttgtatatgcggtttgttgtggacagaaacctcattatgtggtacagtacttcactgtttttttgtttttttttttttttttttttttgagacggagtctcgctctgtcgccaggctagagggcaggcagtggtgcgatcctggctcactgcagcctccaactccctggttcaagtgattctcctgcctcagcctccagagtagctgggactacaggcacctgccaccacgcctggctaattttagtacttttagtagagacaggtttcaccatggtggccaggatggtctcgatctcctgacctcgcaatctgcccaccttggtttctcaaagtgctgggattacaggtgtgagctatcatgcccagcgcgtgacttcactgttttgtcttattttgtttgtttatttatttatttatttatttttgagacagggtctcactctgtcgcccaggctggagtgcagtggcatgatctcggctcactgcaacctccaactctccagctcaagcaacccacccacctcagcctccctcgtagctgggactacaggagcatgacaccatgcctgactaacttttgtatttttgaagaaatagcgtctctgtatattgcccaggggctggtctcaaactcctgggctcacgtgatcctccagctttggcctccctaagt[133 bp omitted]ctcctgggtttaagtgattctcctgcctcagcccccggagtacctgagattacaggcacacgccaccacgcctaatttttgcatttttagtagagatggagtttcaccacgttggtcaggctagtctcgaactcctgacctcaagtgatctgcccaccttggcctcccaaagtactgggattacaggcgtgagccactgcgcccagctgtattttaatttttataatttatttttatttgtagaagaggagtcttgctatgttgcccaggctgttctctaactcctgagctcaagcaatcctcccgcctcagcctcccaaagtgctgggattacaggtgtgaacactgcaactggccaacgttactattttaggagcaagaagtaaactcgttcactcaatatcattacacatatggggtctctgttacagcatcggcatctctaactgtaaacctctcaaggttcctgctggttttcttagcctccagtgagctacctgatatccttccagtaagttctttttctgcttcagttagcccaggaaggttcctgttgctggcaatgcagagtcattttgcaaccgttcactctgtgctaagcaacttcctaagtgttttgcatgtattaattgattcactttcataataaacttacaaaggaagttctgttatcaggcacaagatacccagtgacttgcccaagctcatccaactggtatgaggcagagctagggattgattccaggcattttgggatctgagcccatgcccttcccatgatgcttcactgctctcgagacaaatgatctaagcctaaaaagactgcaagctacatgcacgttcatagcagccctattcatagccaccacgcggaggaaacaaccccaacgttcaacagatgtatgaataaacaaattgtggtctagcc[135 bp omitted]ca[142 bp omitted]gaaaccttgtctccaccaaaaacacaaaattagccgggcgtggtggcacacacctgtgatcccagctactcaggaggctgaggcaggagaatcacttgaacccgggaggtggaggttgcagtgagccgagatcatgccattgcactccagcctgggcaacaagagcaaaactccgtctcaaaataaataaataaataaataaataaataaataggaaattaaccgggcatggtggcccatgcctgtaatcccagctacttgggaggctgaggcaggagaatcgcttgaagccaggaggcggaggttgtggtgagccgagatcgtgtcattgcactccagcctgggcaacaagaggaaaattccgtctcaaaaaaacaaaaacaaaaacaaaaaacaaaaattagccaggcatggtggcaggtgcctggaatcccagctactcaggaggctgagg[132 bp omitted]caagacaaggcaggataggcctctacttcaaaacagagaaaaaaggggctggatgtggtggctcacacctgtaatcctagcactttgggagctgaggcgagtggatggcatgagcccaggagttcctgaccagcctgggcaacataaagagacccccatctctacaaaaaattaagaaattagctgagtgtagtggtggcacacctctattcccagctactctggaggctgacatgggaggattgcttgagcctgggaggctgaggctgcagtgagccgtgattgcaccaccgcactccagcctgggtgacagagcaagaccctgtccaaaatgaaacaaacaaatggaaaaaacaacaacaacaaccagaggctgagcacagtggctcacacctgtaatcccagcttaaaaatctcttcccagagtaaaagttagtcttcatgctggcccaaggcagcccacattatacaggtttgtataatacatacatcatatgtacatgcttttcttttttttttttttttttttgagatggagtctcactctgttgcccaggctggagtgcagtggtgtgatcttggctcactgcaacctccgtctcctgggttcaagtaattcttctgcctcagcctcccaagtagctgggactactggtgtgtgccaccacgcccagctaattttttgtatttttagtagagacagggtttcaccatgttgcccaggctggtcttgaactcctgagattaagcaatcctcccacctcggcctccctaaatgctgggattacaggtgtgacaggccatgcttttctttaagaaataaaataacggagaataaaaagtaacgaagttgcccatcacacataagaacaattattattcagagaaacttgttctaacaagacatataatacataatgtatgatattaacatatcatccaatgtgttatggaacacacttaatgggtttcatatgtttataatatatattaagtatatagaatgcatatatatctgtagttattcttcatgaaatggaatacaataaaataggaaatattaaaccgggctgcaaatattaagggtaattatttaatgaaactttcattccaatgatatgtacataagcacatacactacatataatagatgatgttatgttacacatgacataaaatatatattttatattccattatatattgtgtcacataatatatgaattatacacttttaaaatacatagaattgtaaattattgtataaatatgcacacgatggattacataaactctgcttttttttttttttgagacagggtctcactttgtctcccaggttgaggtgctgtggcctgatctcagttcactgcagccttaaacacccgggttcaagcgatcctcctgcctcagccccccaagtagctgggactacaggtgtgtgccaccatgcctggctaattttttgttttgttttgttttgagaccaagtctcactctggcacctaggctggaatgcagtagtgcaatcttggctcactgcaacgtccacctcctgggctcaagcaattctcctatgtcagcctctcatgtagctgggattacagatgtgcaccaccacacccggctaatttttgtattctttttattagagacggggcttcaccatgttgggcaggctggtctcgaactcctgacttcaagtgatcctcccaccttggtcttccaaagtactgagattacaggcgtgagccaccgcgcctggcctaaaactctgcttcttattgtggcacgtggctgtagattgaggtggaggttctgagatctgcgcgcagtgggggttactgctgagcactggggtcatttcctatggggaaggagggagggagggaggactccacagagggggaagctgaagccagatgtggtggaagcagaggcctgagtgatcctgttggggctccagagctgggatgacctccacagttgtgccaatcaaggcaaggggcagcctttgcttgcctggccccctcacctaacttctcccctcgcttactctattccaggggatggtaaactttttctgtaaagggccagagagtacgagagccctaggatctctgtgcaaatactcagctctgtcactgtactgcaaaagcaactgtggaaaatatgcaaacgaatgagcgcctgggttccaataagtctttatttacaaagacaggaagcaagggtccccttgatttggcccaaaggccttggtcagcgagcctctgctctattctgacagccagaaactcttgctgttccaggaacaggccaaggccacatctgtcctaggactttcacagatactcacagccctcttcctatctccctccatctgaagcgctgcctcctccctgcccacctgtctagatcagcggtgcccgtaagtccggaactcctaccctgcctccattcctctcagtcctcatcaccctatgctggattagctttttccttttttttttgagatggagtctcgttcttgttgcccaggctggagtgcaatggtgcaatattggctcaccgcaacctccgcctcccgggttcaagcgattctcctgccacagcctcctgagtggctgggattacaggcatgcaccaccatgccctgctaattttgtatttttagtagagatggggtttctccatgtcggtcaggctggtctcgaactcccgacctcaggggattggcccgcctcggcctcccaaagtgctgagattacaggtgtgagccaccacgcctggccactctttccttctttattgccggtctctggcactagaatgtcagctccagtgagggcctctgcttgctcccaactggctcccagctactagaatggagcctggtgcagttgatcctcagtacactcagagttgccatgcttctcctctctctgtccacaccgactccagctacaagccattgccactgggggacccaagcctgccactcagcaacacagcgaccagcccaggagtagctccgtgagccaatagatcaggttggggcttatgtaaagcccattttctcctggggtggctctcagccattttgcctccctccaggcaatggcctgccctacagagaaaccaacaagagggacagcagggcctgccaggagatgggaggggcacagccctcagggcacctcccagggttttgtgagctgggatgaatgggtttatagtcctgagtcactccagagggaggattccggattcagcccagcccctgcttcctaaacaactatggggtggggcagggaacactggaaaagaaatgtacgtgtgagcatctgtaagacccggtgacggcagggctggggctgtctctgtcaccactgtgaccccagcatagggtggggcagagagtgggtaactcagtgagttttgtgttttattttttttattttttttttttttgcgggagacgccctaccaaggacactgggtccatgtcccggtgcgggaccacctcagtgagttttttgagtgaaagaataaataaaggatatttttcctaaggttgacatggaccttatttatttatttatttatttatttatttagagatgaagtctcgctctgtcacccaggctggagtataatggcatgatctcggctcactgcaacctccgcctcccgggtccaagagattctcctgcctcagcctcccgagtaggtgggattacaggtgcacaaccaccatgcccagctaatttttgtatttttagtagagacgaggtttcaccatgttgatcaggttggtcttgaactcctgacctcaggtgatccacccaccctggcctcccaaagtgctaggattacaggtgtgagccactgcgcccagtcccaaggactttttaaatatgaaaaaagaatgcatcaacttgaagataatcagcttcatttacaaatttattctaacccctctccccaaattacaaggtacacagaattctagctagcagaacacacgagcagtgaaccatcctctggcctcttgcattttgagaggacgttctttccacttccacacactctggccacccctgacgccgcagtgggggaagtagatggccctgctgcccacgatgactggctgcctgtcagggcagggcagggcagggctgagtgcgaagtctctgagatgtgagagcagcactccatctgggtcaggacagcgctggggtcaggaattggagctcctgcctgtgttcacactcccacctctgttttttttttttgagttgagtctcactctgtcacccaggctggagtgcagtggcgcgatctcagctcactgcaacctccacctcctgggttcaagcaattctcgtgcctcagcctcccgagtagctgggattcaggaatgtgccaacatgcccggctaatttttgtatttttagtagagacggggttttgccatgttggccaggctggtctcgatctcctaacatcatgtgatcagtccaccttggcctctcaaagtgctgggatgacaggcgtgagctggcctgggtcactcccagttttaaacacagcccactcaggacccactcggtcagttccctctgctcc[148 bp omitted]accccgtctccactaaaatacaaaaattagccaggcgtgggtggtgggcacatgtaatcccagctacttcggaagctgaggcaggatcattggttgagcctgggaggtagaagttgcagtgagccgagattgcaccactgcactccgtcagggtgacggagctagactgtctccgaaagaaaagaaaagaaaaaagaagagaaaagaagaaaagaaaagtttcagaacctgtttcttggctttctatctgggcagatcttggtccaggccagttttacctctttagagaagggaggtgaggatggaagtcggggaaagcccggccctcccactttcacctgcagcttcccaaaagcgggcccaggtggaatggtcacccagtttacacaatgctatgatctctggtgtgatctggggctgctctgagaggggatagagagggtctcccactatcaacgccacctctgggatggtctgggcctctgtgtagagatcgtcaccctcccagcctctgctcagccatcgcctctccctcctcactctgcagctggggtaatccaagcctctcactctgcccctactacttcaccaccctgggcagtcagcccctcactggctgtggcatctctggcaagtccctttgcttacccctggccttagtttccccagctcatagggtgactcttgggcctctccccatcagaaccctcccagtttccctcctgattttaataagctctgtacccattgtggagatccacatggtggttcaggtacagcctcaggatgccttcatcaccttgcagctcctctaatgagagagctacagtcggaaggacagactgcaggctactgggacccaccccctcccgcttcagtggcagatcctggaagagaaacccagtagaaaagggtggttcctagactgttcctctcagctagcaggaaggccaaatggcccgcggggttggcaggagtcccagggtactttttttctgagaaagggtctcactctgtcatccaggctggagtgtagtggcgcgatcacggctcgctgcagcctcgacctccagggctcaggtgatcctcctgcctcagcctcccaagtagctgggactacaggcatgcatcaccgcacctggctaattttttattttacttttgtagagatggggtctcactatgttgcccaggctggtcttcagctcctgggctcaaagagatccctcctgccctggtctcccaaagtgctgggattacaggtgtgagccactgcacctggacgccagcgtactcttggggtgaggaggaatagtgggctgaatggcttgaatggtgtgcccccaacagacaagtccacatactaacccccaggacctgtgcttatgacagtttatttggaaaaagtgttttttcagatgtaattaagggtcttgaggtgggatcatcctgaacttaagatgggccctaaatgcaatgacaggtgttcttgtaagagacaaaatagaagagggaaaaggccatgtgaagctgcaggcagagccaaggaaggcctggaatcaccaggagctggaagagggagcgtgtccctgtcagcaccttggtttcagacttctggactccagaactgtgtgaattaaattcctgttggacttaagccatcaagttcaccacccaatggtgatctgttatggcagtccaaggaaattaatcaagcagttaaggccaactgctggcctaattggtaggatgggggtgggaccgggggctatggaggcaggagggtactgctacatgaagacaggctgtcgggtcagtccagagctccgaggaaagaaagcaagagcacacagattaggagacacggatggaagatgaaggatgtgacaattgaatccatgggcttggattcgactgggtccctgagaaatgctactgagcaaggtggggaaggcaagaaaggacatgccacacagtacaagctccagggactctgaggacaggaaaatagggggctgaggctgaaggacaggctggattagccctagttaggatcaaatttcccaccacggaaaggggggttggaggacattcacagaaaagatcctgtagtgccattccagtgggttgtgccatagactcaaggatgagggggttctgttggaatagtccacttcgggtctcaagggaaggtacaatgattccagggattgactgcaggccaggaccttttgtgggtttttttaagatggagttttgctcgttacccaggctggcatgcaattgcgcaatctcggctcactgcaacctctgcctcccgggttcaagcaattctcctgtctcagcctcccaagtagctgggattacaggtgcatgccaccatgcccagctaatttatgtatttttagtagagacggggtttcatcatattggtcaggctggtctcgagctcccgatctcccgacctcccgacttcaaatgacccgcccacctcgaccttccaaagtgctgggattgcaggtgtgagccaccgtgcccagccaggattttttttttttttttgagacacagtcttgctctgtcacccgggctggaatacagtggtacaatcttggcctccacctcccaagttcaagcaattctcctgcctcagcctcccaagtagctaggattacaggcacccaccaccacgcccggttaacttttggttttaagacggtgtcttgctctgttgcccaggctagggtgcaatggtgccatcttggctcaccgcaacctccacctcatgggttcaagcaattctcctgcctcagcctcccgagtagctgggattacaagcgcaccccaccacacccggctaatttttgtatttttagtagagacggagtttcaccatgttggccaggctggtctggaactcctgacctcaagtgatccgcccgcctcggcctcccaaggtgctaggattacaggcgtgagccaccgctcccagccgcaccgtttttttcctccttaagagagcactgatgctcagctagagctgaccttagaaggtgagggggagaaaaggccactgcaacacactgcatttccttacagtggtctgtgccgattgacaaaaagaagaaggtgttccagtgtaacagatgagtgtcccagtaaaggttaacactgatcaggtaaaccgggggtgggggtaacaataacacattgattcagctcaagaccaggttccattttttcatttgccagagtgcccacggtgtcctgctggctgggaccttgcaggtcgtcctggtttggagtgggggataggaggtgaaggatgatggagggggctatgttgcaacgcttcacctgctggtcccagtggcaggtaacggctgctcttatcagcaggggtaaccaaatgccaagttgcatcaagatcctggtggtttccactgggccagcgcaggcaagggtggtgcgggaagaaggccacgttaggtacataggccatgtccaaattcaggttccatccagcaagctcctatttcttggacgcaggcactgcgtgggaagcggaccggccgggattgcagagctgggcgcgcacctcttgcagctctgtgcgcagttcctccagggcgccctgtggcggcgccgcctgcacctgcgcctgcagcgcttccagcgccagcgccaggtggcccacctcgtcccgcagcgcgttccaggcagcacgctgctcctcctccttgtggcgctgctgcgcctggtggcgccagtactccagcactaggcagccgccgcccacgatgaagatggtggcttcgcccagcagctctgcgcccagctcagctgccgcctcctcgttcagcggcttgatgaccgtgccccggaagcccatgatgcgcatcttggtccgcatctccacccagtgatacactgcgggggaagagaggggtcaggctgcgctctgggagccccctgcaagccccacccctctcacccagggaatgcagtcacctagcctgggtaacccaggggtcttttaaaagaccagatgattctagcgagcagccaggaataagaaacactgccccagaagggaggtcctcggacttgaggggccgcgccccaagagggacaccaggagcttccacagcgccaagttcatggacggtgtaaaggtccagttgccagatgcttagttccctgtgttcctcccttaagccactgccatcctggctgtcctgccctggcactgtcgccccacccacttcccaggagaaagaccaacctcctttcttgccttattttcccaaaatgcaaagttggggctacagatgggggagaggggggctcctggctccaaagggcagcttaaggtggcagtcgatgctaagtgcctctgaacacttagatacacttgtaataatcaatcatttttgcaagtctgatggctccaatcctagaatttcatcagccctgaaggtgcagctaagagctgcgagctcttcacagtgaggttttgggcacataccttggtgggagctcaagaggtgagtggtgctgctggaacaaaaactccttccttgcctagctgcttctttatgaaggaaggttctcagcacttgagtctttaaaaccaatgcagaattgatgctgcatcctgactcactcctgcaacaattaatattcatccaagggcacatgaaaccacagagggaacccttgtgtggtgcctttgcagactcatttgcaacatctccttttacttttaaggtttagtaattattcatgaaaatgtataaaagatgaactttttgttgttgttgttttagagacggagtctcactctgttgccaggctggagtgcagtggcacagtcttggctcactgcaacctcctcctcccaggttcaagcaattcccctgcctcagtctcctgagtagctgggactacaggcacgcgccaccatgcccgtctaatttttcgtatttttagtagagaaggggtttcaccacgttggccaggctggtctcgatcatctgacctcgtgatccacctgcgttggcctctcaaactgctgggattacagccatgagccaccatgtccatccaaaagatgaacattttaaagtaactgcgcactaataatttcaaaattaactcaatccagaagaaaataacttagcatttagaaccttatggtcacaggaaattaacatgtaaatttctgtatgtattttggttgccgacatataaatcactagatggaattctgtgggtatgtggactgtaaatacaaaagtacatgaacaaaaagaaaccatgtgaaatttctgactgaaaaagaagagcttgtttttatttgtattattttcgagacggggtcttgctttgtcgccccggctggagtgtagtggcgcaatcatggctcactgcagcctcgaccttccaggctcaaatgatcctcccacctcagtcccttgagtaactggga[136 bp omitted]gcctcctgagtagctgggactacaggcgcccgctacc[142 bp omitted]gtcatttttgtattttttttaaaatagagatggggtttatcagtatgttgcctaggctggtcttgaactcctgggctcaagtgatctggctgcctcggcctcccaaagtgctgggattgcaatcgtgagccactatgcctggcctatatatatatatctttaaaccagacattggtaggcatcaaatcattattgtatgcgaactgcaataaatatgaagggaaggatgcaccagctgtttgaacatgtcagtatcataacacaccagaaccagaaattccatccttcacaactacttaaggttaatgaagaaaagttttacttgtcaacttgaaaatgcactagagggcacacaatttattttttctttttctgagacaggatctcgttctgttgcccaggctggagtgctgtggaacaatctcagctcactgcaacctctgcctcccaggctcgagtcatcttcccacctcagcctcctgagtagctaggacaacaggtgcatgccaccatgcctggctaattttattttttttgggtagagatggggtcttgccatattccatcttatttatttatttatttaacagatgggctctcactctgtggtccaggatggaaggcagcggctccatcacagttcactgcaacctcgaacacctagactcaagcaattctcctgcctcagcctctggagccgctagaactatagatgccccaccatgcctggctgtttttaaattgttttttggtagagactgggtcttgctatgttgccaaagcaggtcttgaactcctgggctcaagcaatcatcctgcctcagcctcccaaagtactgggacgacaggagacagccactgagcccagccactacacatttttcatcttcaaaggggtggggtggcaggaaggcttggggagctctgctggagctggagggaagacctgaggtgcaagcttagggcccgagaagtcactgtcactgtcactgtcagctgctgcagttactgttacagctgtgacttaggccctgggcttgtgggttcctggggtccaggctgtggagacccctcccacactgaggtcttagggtcaggctgatctggggtccccccggggctccgccacctgctgcctgagcaatgacagcctgccccaaggcccctctgtaacacaggaaggacagcatcatcctgacaatgacactcgccagacctggtggtggcccagagctgggcccgtaactgtcactgcctccttcatgtcagggacacctagcacagtggccagagagtggtgaggggtgagggttccagatcctctagccttcctgggtgaggttcccagcgtggaaatgcaagtgtctcagtgcagaccaagcatggggatctgggccagcaggtgggtctaggtgtgccaatgggagtgggcacatacccaggccacaggaaatcaaatcaagagggtgtgtgtgtgtgtgcacgcgtgtgtgcacgcaggcatgggctttcagggctttcagagcaggggccgacggcattctccctcgggccagcggtcagatgtggggttcaggaaacaaggcccaggtggggatgaatcacagggctgtgattctagaagggacagctgtgaggggccgggacaggctaagctggaggactcaccagacttgcgggggtcaacacgctccagatgtctcctagacctctcacactcagcacatccaaacctgaacccagcacctggccccacacctgtcccctggctagagacgggggcctcagcccagctgttccccttctcccacagcctctcagctgcgtgtcgggtccattctgcatcttgaacatctctcccagtggattcccttctgctgtcctggtccaggatccatcccagctctgaccaacgttctcctccctgacctcctgaataggaggaatacagcctgtctatccccttctgagtgcctatcacaaccaggaatagtggctatccagttacctgtctgcaatcagtctccccactgtcctgtaagcctcacaagggtggggcccagggctgtcacagtcactgctgtgtccccagcactgcccagtgccaggccaggcacacgcatgatgctcattagatctaagcttaacacataagtgagtcccgcctccagcctccttcccacctgccggccccagcctcacccctctgcaattgtcccccacgcagcaatcagaaggaattggtgagaagaaaagaacaaactggctgggcgcggtagctcaggcctttaatcccagcgctttgggaggctgagacaggcagatcatgaggtaaggagttcaagaccagcctggccaacatggtgaaacccatctccagtaaaaatacaaaaaattagcggggcgtggtgggaggcccctgtaatcccacctactcgggaggctgagacaggagaatcgcttgaacccaggaggtggaggttgccgtgagccaagaccacgccactgcactccagcctgggcaacaagagcaagactgtctcaaaaaaagaaaagaaaagaacaaacctaccattccccgtcgccccacccccaactcctgccgcaaataaaagtaacacatggcaagaaaacaaagtactcaaactataaaatgtaaagccaaagtcccctcctcagaggaaccctcaactactgcggtcgccagcctgttttcccctagcgccatctcctggacagcccatagtaagcatacctcactcatttctgagctcttcaactggaggtttgttcagatctacgccatcgttacctactcataatccagccccactatgaaaggtgagcactctgcccccatgcggcctgccctttctccgctcccccatttctacaggggatttgtatgcagtttttattattctatgttctgctgttttttttttttattttttttagacggagtctcgctttgtccccaaggctggagtgcagtggcatgatctccgctctgcaatgcagtggccatggaaacactctccagtgtggtgtgactaaggcagagaggagaccctctgagtgctgcttcatgagactttggtgcttttttttttgatacagagtcttgctcttgttgcccaggctggagtgcagtggcttgatcttggctcactgcaacctctgcctcccgggttcgagtgattctcctgcctgagcctcccaagtagctgggattacaggcgcccaccaccatgtccgactaatttttgtatttttagtagagacgggatttcaccatgttggccaggctggtctcaaactcctgacctcaagtgatccattcaccttggcctcccaaagtactgggactacaggtgtgagccaccgtgtctggcctaactccaacttcatgagagatcttaacctataattttccttttctgtaatgactttatcaggctttgatatcagtattctattggactcataaaatgagtaagtcagtattcctactttctctattacttaaaagaatatggacaatggtctttctttctttcttttcttttctttctttctcttctctctcttctttccctctttttctttcttttttttttttttttttttttgagatggagtctcgccatgctgtcccaggtggactgtagtggcacaatctcggctcactgcaacctccgcttcccgggttcaagtgattctctcacctcagcctcccatgtagctgggactacaggcacataccaccacacctggctaatttttgtatattttggtagagacagggtttcaccatgttgaccaggctggtctcgaactcctgacctcacgtgatccacccgcctcagcctcccaaagtgctgggattacaggtgtgagccaccgcacctggccccctccatttctctcttcctgtcttttcccaattcttcttttagatctcagctggactgtcccttcctccaggaagccctccctgaaccataggctgggtcagacacattctcaaggttctcaaagctccctgggcttaacacgaggccggccttaataaatggcagcaagacctttggagtcgcacagacctggactcaaatcctggttctgtcactttctggattcgcaagctgagccttggtgtttccttatcaaaactgggggtcaaaatactcaactgacaggattgggagaatggcaatgacagagtaagggagaaaatgctcagtttgtaaatgttaacctaatatcctcttcctgacttctgtcaggaattttattcctggaagtacatcctacccactggtgtgaatctactcttgggttacatagaatcgttttccgtctcctccctgaactctctccctccagactcactccctttcatctgtcttccataccggagaatcccaactcagatgtcccctcctccaggaagccttccctgacctccagacccctgggatcctctatctgagctctgactgctctgggtcctcactgcatggtgacaagtctgtctctccaactggactgtgaggccgatgcaggcaggacctgaggctaactcggtcactgcactgtccccagccccagataggcacagagcaggcacttaatgaaaaagctgatctgtggaggtgcccaggaggtgaccatggacaatgggtatggctcctgtctctggctcccccatctcccttctctctctcctgatgcttttggtgttatctgtcccctcgagaatgtggcactgtgcattgcccctcctcctggatttcctggattggctccaggccccctctacacatctgtctctgatatagaccctttcctcggcctcagtggctgtcatttctcagggcaccatttcctaagcccttttctcactcgactgtcacatctacttccaggggccactcagaacttcaggacccaaactcctatgctcagatctctctcagccccggagctccaggccacaggcacttcagacactctaggtcacaacacagtggctgaccaagcccagagagatttccccgggaaaggagggatatcttaacccactgaggcaagtaaagtgacgtacttggccacagttaactattgttcaagatttttctgagcatgaaactgcaggtggctggaatgcaaccctttcctcaggaaatgtgctgctaagaccaaacagctccctccgt[144 bp omitted]agaaaccctgtctctactaaaaatacaaaattagccaggcatggtggcgcatgcctgtaatcccagctactcgggaggctggggcaggagaatcgcttgaacctgggaggtggaggttacggtgagccgagatcatgccattgcactccagcctgggcaacaagagcaaaactccatctcaaaaaagaaagaaagaaaaaaaggacaaagcacctcttccccactattgggaacacgcctgcatacgatggctgcttccttgtaaaatgaagggaaggtattcctcatagggtccactactcgatggtgaagggtcgtcataaggacacagtagtgactgctagagcccacgatggcaagacggccatgacgaacatgctggctactgagaggctaaatcccgtggaaccggtaaccggaactgtatactagggaggagggagaggttatttaatatgggagagggaaaggaaaaacatcaaatccttatctttcatacaaggaagttggctgataataaaagatggggaagatcccagcactttgggaggccg[134 bp omitted]gaggcaagacaatcgcttgaacccgggaggcagaggctgcagtgagccgagaccatgccagtcagtgcactccagcctgggcaacagagcgacactccgtctcaaaaataaataaataaataataaaataaaataaaaataaaaaaatgaaagatggggaagaaataataaaagatgagaaaaaaatttccaaatgaggaatgtttagaaattctcttattagggccaggcattatggctcacgcctataataatcccagcacttaagaggccgaggcactggatcacttgaagtcaggagttcaagaccagcctggccaacatggcaaaaccccatctctactaaaaataaaaaattagccgggagtggtgatgcacacctgtaatcccagttacttgggaggctgaggcaggagaatcgcttgaatccaggaggcagaggctgcagtgagctgagatggtgctgcactccagcttgggtgatacagtgagactccatctcaaaaaaaaaaaaaaaaaaaagaaaagaaaaaggaaaaagaaattcccttattaagaaacatgataggccgggggcggtggctcacacctgaaatcccagcactttgggaggccaaagcaggtggatcatgaggtcaggagttcaagaccagtctggccaacatgatgaaaccctgtctctactaaaaaaaaaaagattagctgggtgtgatggcgcacgcctgtaatctcagctactcaggaggctgaggcaggagaagctcttgaacctgggaggcagaggttgcagtgagctgagatcgcgccactgcccagcctgggagacacagcgagactcagtctcaaaaaaaatataaataaataaaagaaatgacacctaaatgaacgtgcatttctggagaagatcctggaacaggcagaaaaggacaccagtggaaacactgctgagataggaatgaggcctgcaggctttataccagtgttcatttcctgggtcgcctcattgcattgtggttatgtaaaatgttatcatccggagactctgggtgaaaggtatgtgggaactctctgtacttttattgtaactcttctgtgggtctaaaattagttcaaagtagaaaaatgaaaacagaaacagcccccaggtggctcgactgtgaggaaatggaccttctcacccatttgctggtgtaagtgtaaatccttgcacaccctggagtcagtcattctgcttctgggcatttatgtcaggttcacccgtccaggtgggaaaggccttgctgggctccttaatcctgcagcatagtgtatgataacaatttttttgtttgttttagagtcggagtctcactgtgtcgcccaggctggagtgcagtggctcgatcttggctcactgcaagctccgcctcccaggttcacaccgttctcctgcctc[210 bp omitted]ccctctgacactataatctcacaaattccagcatttctgtcagcagctgaaatagagtaaggaagtcttgttttttgtttttgttttgagacagggtttcactctgtcacccagactgaagtacagtagcaggatcatggcttactgtggcctggaatcccagcgatcaaacagtcctcccacctcagcctcccaagtagctgggactacaggcgcacgccaccatgccctgctaatttttgtacttttagtagagatggggtt[132 bp omitted]ttttgtcatgttgcccaggctggtcttgaactcctgagctcaagcaatcggcctgtcttggcctcccaaagtgctgggattaccggtgtgcaccactgtgcctgaccaaaacagataattaaaacttttttcaaaaaaatcaaacaagccaccttggcccccaggattccacaggttaagcctatacctctgcacctctgctccctcctcaagacccaataaaatagcagtcctggaaggaaagacagcagaagccacaagaacaaagagaagcatcagggtgggggtgggggggttgggagggtatgcgactaggcggaaggggagggaatcaatgcaagccttgaggcgggagcagatggctgagaggtaactgagccagcagggaggctgctgagacctaggcaccctggaaggggggcaggtagagggaagaaggggagagggggaaagggcggtgacaagaagcagaaggaactggagactaggaccacacatgcaaagtgactgagggtggggttaagcccaggatccctccttgactgggggtaaaccaggaggactctgagaacagcccagggggcaagtgccacactgaaaacaagcctgttcctctggcatggggctggtgggcaatgcagacatcaagagcccactcagccttggccttgaactccagtaaccctgcctggtgttgctggggacaaaaccacacctgccactgaggtccagataggggctctgcttagctgtgagcctggccatgaggtgatgacgatgggaaggatctgggtcaaagacatcccagtggctcccagacccctgcttctctgtctccctccaaagccatttaaaaatacaccaactatctcttttttaagagtttgcattgttccctgctatctttgaagttccacctacattttactttctctataaagttttatcctaatgtgacttttttatgctcaaatgtcctatcataagtctctgaaacaaaaatgtatctataaattaaaatcaaaaatttcattctttgtgattttagttaaaacttttctcggccgggcgtggtggctcacgcctgtaatcccagcacttcgggagaccgaggtgggcggatcacgaggtcaagagatcgagaccatcctggccaacatggtgaaacctcatctctactaaaaataaagaaaaaaaaaaaattagctgggcgtggtggcacacgcctgtggtcccagctacttcggaggctgaggtaggagaattgcttgaacctgggaggcggaggttgcagtgagccgagatggtgccactgcactccagcctggtgatagagcaagactccgtctcaaaaaacaaaacaaaaaacaaaaaacaaaattttctcttggattgcattatcatgcaatttctattagtataccactgatcgaaactgcacgcattacataatttgatgtctagtggctgggcgtggtggctcacgcctgtaatcccagcgctttgggaggtcgaggcgggtggatcacctgaggtcaggagtttgagaccagcctggccaacatggtaaaaacccgtctctagtaaaaatacaaaaattagccgggcatggtggcatgaccctgtaatcccagctacccgggaggctgatgcaggagaatcgcttgaacctgggaggcggaggttgtggtgagctgagatcatgccattgcactccaacccgggcgacagagtgagactaacttttgtatttagtctaattacggctaatttttgtaattctagtagagacagggtttcaccatattggtaaggctggtcttgaactcctgaccttaagtgatccacctgcctcagcctcccagaggctgggattatagccatgagccaccgcgcccggccacaaaaagatttttaaattagctgtacgtggtggtgcatgcctgtggccccagctactcagaaggctcagaaaggaggatcacttgagcccccaggttcaaggctgcagtgagccatgatcctgccactgtactgcagcctgggtgacagagtgacacttggtcttaatcaaatcaatcaatcaatcaaatctgacaaagacatacaagaaaataaaattatagaatatgtcactgatgaccacagatgaaatctttaggaaaatattagcaaacgaaagccagcaatatataaaaaagataatatagcataatcaagtgggatttctgcaggaatataagattggtttaatattcttttttttattattattattgttttttgagatggagtcttgctctgtcgcccaggctggagtgcaaaggcgcaatctcagctcactgcaacctctgctgccagggttcaagtgattctcctgcctcagcctcccgagtatctgggattacaggcgcagaccactgtgccctgctaatttttgtatttttagtagagttagggctctgccatgttggccaggctggtctctaactcctgacctcagatgataatacccgccttggagtcccaatgagctgggattacaggagtgagccaccactcc[136 bp omitted]tgcctcagcttcccaaatagctgggactacaggcacgtgccaccatgcccagctaattttttttttgtatttttagtagagacagggtttcacca[146 bp omitted]attttactcctagataattactgggagaatttcatttctaccaagagaaatgaaaacatccatataaaggcttgtacacaaatgttcatagcacctttacttgcaataacttggaaacaacccaaatgcccatcactaggacagttattaaacaaagcatggcatattcatatactgtaataaaagaaaagaatacacttttattaagagtaataaacaaaataacaaaataaactagacaggcatggtggctcacacttgtaccccagcactttgggaggccaagcggtgaggatcacctgggcccatgagttcaagaccactatcggcaacttagtgagatccatctctacaaaaaataaaataaattagccgggcatggtggcatgtgcctgtggtcccagctactcaggaggctgaggcaggaggatcgcttgatcccaggaggttgaggctgcagtgagccgtgtttgtgccactgccctccagcctgggtgacagggggagaccctgtgtcaaaaaaaaaaaaaaaaaaagaagaagaagaaatgaactattgatacattcagcaagaagtatctcagaagtatcaaatgaacaaaagctaaacataaatttcatagtgtatgattccatttatatcaagttgaacaacaagcagaactaatcaacaaggagagaagtcagataaggagacagagcaggggaggagggacctttctagagtaatgacgatgttttatatcttgggtactagttacatgggtatatgcatgtaccaatactcattgaactgtagcctttagatctgtaccttgcattgtacagatactatatctcaacaaagaatataccaaaaaaatcaagtgccaataattaaacataagaggaggagtttgggagccagtgggatatgacttcttatcctgtactgcctcagggaacctgtttctctcgctttgagagatttcctcactcataaaaccaggatggtcataaactccctaaataaggtggttaagatcatttgctgagataatggaaagcatattaaataaaagctgttattatcagtcaataaattattattcagggtaaacgtagcttcaagccagtctctgccctggttgcacttccccagatgtgatccagtcagatgatgatgatgatgacaatgattattactgttattttgagacacagtctcactctatcacacaagctggagtgcactggtacgatctcagctcactacaacctgagcctccaaaggtcaagtgattctccagttttagcctcccaaaatgctggtattacgggtgttggccaccccacctggcaatccagtcaatttatttatttattttgttatttatttattttttgagacagagtcttgctctgccacctaggctggagagcagtgacacaatctcggctcactgcaacctctgcctcctggtttcaagccaccctcctgcctcagcctcccgagtagctgggattacaggcatgccccaccacatctggctaatttttgtatttttagtagagatggggtttcaccatgttggccaggctggtctcgaactcctgacctcaggtgatccgcccacctcggcctcccaaattgctaggattacaggtgtgagccactgtgcccccgcccaatccagccagttttaagcttgccctaacagtgctccaagtattaacagaattgtgcaggccgcaataggcagtgcttcctcccacagacctggcttgatctttccattacagcaacccgagactgcagtaacacacaatgctccagttaccagaggggcatgactggttccatctgcccagcatcctgggggatcctatctccccaacttttggttcaagggattcaggaggaggtaaccccactcctgagcctggccaattagggcactgctttccctgggccacagagacggtgctgggatggggatgtgacgcagggtggaccactggattcagcctgggaatttggcaggaaatccgggatgaggcacccctctgtgccctggggtcactaggcaggtaactaataccctcaaatgtgccccatgagagcaaggatctttgttctgttgactactgagtcatgcctcttagaacagttcctggcacacagcaggcactaaataaagatttgttgagtgaatgaattactcagcctcctaatggactgaagcatagccacaccccagaaaatgatccccacctctactctcctcccaggcctggagagaccaactcaacttggtatagaggatactcagggg[131 bp omitted]gccaacatagtgaaacaccgtctctactaaaaatacaaaaattagctgggcgtggtggcgggcacctgtagtcacagctattcaggaggc[137 bp omitted]gtctgattaccagtgctactttatattattctctactgtcttagtaattccatcctccccacctccattagagtttagaagccgatactcaccactgcaacctcccatacaccaaggggtgggaggtgacccggttgtggtaagctggcagtgaggggagtttcctgggggcttctggaaaaggattttcctccttgaagcgttaccctcacttacctgaccacccgcccctccatacacacacgcatagacttcctcccttatgaaacataaaggcacaatgcctggagccgcagcagccctactgaggccatgaggactgcctgagcaccaacacagcagagatggagtcctcaggttcccaatgacaccactgagccaccaaaccaaccaagaacaggccttcctcagggcttactgaaaagccagcaaaaaacacccttttgatttaaggtttgattgacatttactggctgggttttcaattaattacagatgagcacaaactaatacagagatacaccggggtcaatgaccgagatggcctctggtgctttctcaggcaggcgccatccccaggctgacacgggcgccctctcctgtccacttggcatattgcttgcagccagcgcaagtagattccctgggatgcactcaggttgcaaatcagccagccctctacacaggggcttctgaaaaagatccctgttcagaaatcggccagaagatttagccatgagtacatgagcaaattccagcaaatgcctctgcataatgaagggtgggactaaaaaaggagcagcgagattaaacgcagccaatgacacacttcttccatctgagactatgtgccttagttaggtctttgccagctgtgacagccacatacaaagaatgtcaaagctggctgggagcggtggctcatgcctgtaatcccagcactttgggagactgaggtgggcagatcacctgaggtcaggagttcgagaccagcctggccaatatggtgaaaccctatctccaataataatacaaaaaaaaattagctgggcataatggcacacccctgtaatcccagctacttgggaggctgaggcaggagaattgcttgaacctgggaggtggaggctgcagcgagctgagattgaaccactgcactacagcctgggcgacagagtgagactccatcttggggaaaaaaacaaaaacaaaacaaaattagccgggtgtggtggcagaagcctgtaatcccagctgctcgggaggctgaggcaggataatcacttgaacctgggaggtggaggttgtagcgagccgagattgtgccactactctccagcctgggcgacagagtgagactctgtctcaaaaaaaaaaaaaaaaattcaaagccagactctcacagagggtttcaccaagagtttccaaatttacttaataatgtctgcataggaaaatgttttcggtgacagcaaaactatttggggggggggggcatgaataaataagtttattttaaaaatttttatgttcgtttcatccctctaatttttgtgtatgtttttaaatgcatataatataaccatactattatatgttagcgctatacatgactgctaaatactttcatttatttatttatttacttattttattttatttttttgagacagggtcttgctctgtcgcccaggctggagtgcaatggtgcgatcttggcacaccgcaacctccacctcccgggttcaagcgatactcttgcctcagtctcccaagtagctgagattacaggcatgcgccaccatgcccagctaattttttgtatttttttagtagagacggggtttctccatgttgttcaggttggtcttgaactccccgcctcaggggatccacccgccttggactcgcaaagtgctgggattacaggcatgagccaccgtgcctggctgactgctaaataattttacatatgtgtacacacgtgcatacatatatgctagggaaggaacctcagaagtgtttccttgataggagaacataataataaatgtttggaggtcaccagcagcagcctggctgccatataatataactgatgtgacgctctggtgattataaataaactccagcaaagtgattttcaaacactggtgcgtgtgagaatgtactctagagactgctaaaaataaacacgtccaccccttccctacgtccaccaaatcaggacctgcaggtagcactcctgggcatctactggaagtgccccagaaagctcactagttttcctccatattgtgcacctttcagctccccaatcctcttggcagttgtgtttaacctggtggttagttagcccttctattgagagctgaacaccaactgttgtagctgtcctttctagaagttttgtttaattctttttccagcttcctggcaatttttcattttacttgtgttttaatatccttctcttttatcctcttaacagataagcttaggtattttatatccacatctgataattccacgtttgcaggctgtgacctgccatgtttttctgctggctctcgctcatggtggctgcttttttcatgtggtgtatatatatatatcaatatatattgatatatatatatattttgtatttttagtagagacggggtttctccatgttggtcaggttggtctgatatatatatgagatatatatatatctctcatatatatcgatatatatgattatatatctcatataaataaaaaataaaaatatatatagtatatatatcgatatatatctcatatatatcgacatatatgagatatatatcgatatatatctcatatatatcgacatatatgagatatatatcgatatatatctcatatatatcaacatatgagattatcgatatatatcgatatatatcatgatatatgtatatcaatatatgatatatatcatatatcatataataatcatatatatcgagatatatgagatatatatcatatatgagatatgagatatatatatcatatgatatatatatcatatatggatatatatcatgatatatgtatataaatatatatattgatatatatcatatatatcatgatatatgtatataaatatatatatcgatatatatcatatatatctatatgagatatatatctatatatatcatactatatatatgatatatctcaatatatacctatatatcatactatatatatagatatatatctcgatatatatctatatatatcatactatatatagatatatatatcatactatatatatagatatatatctcgatatatatctatctatatatattttttttttactgtgagcttgtatgtgctggaactctatctgaaggatttctccaaggcctgggcagagagagcacaggcaggaagagtttatgtttgcccttgccaggtgcttagatacaattaggtacccctaggggttcattctcagcctgcaacttccaggacctttcaaagaggccccaagcccacatgagggacagtcagtggctacaaattctcagaggagaatgtatcagtctctacctagggcaaagcttgtgtgccttcagacggaggtttttttctagttcaccaggtaccttgccagagacctggttctacacaaggctgttgcctgcccaattcccccacagcatagtccccatcccccaggccaagtgatacggtgtggctgtgtccccacccaaatctcatcttatattcacacgtctcactaaaaatacaaaaaattagctgggcatggtggcacatgcctgtaatctcagctactcgggaggctgagacaggagaatcacttgaacccaggaggtggaggttgcggtgagctgagatcacgccactgcactccggcctgggcaacaagagcgaaactctgtctcaaaaaataaacaaataaaatgaataaataagtaaataaacatgtacagagtacttgagggccaggtacagttctatgttttatggatcttaatatccacataacaacccaattacaagcataaaactgaggcccagagaggttaaataactctccctggggtcacacagaaagtggcagagcggggacagataagcaggcagcctggttcgaggccgcgctgcaaacagtaaacagtaaacactgtttactgaatggtgctgagggaacatcagaactatgaggttaagtgctattcggtacagaaaggcagagggactcatgcaggacacacaccacgtaaacagcagggcaaggatctgagtgcacgaagtctttatctagaagcagaggttttggcacttgggcagtaatgacaagaagggattccggctgggtgcggtggctcacgcctgtaatcccaacactttgggaggcca[134 bp omitted]aaaagcctg[221 bp omitted]ctgagaggcaggagaatggcgtgaacccgggaggcggagcttgcaatgagccaaaatcgtgccactgcactccagcctgggcgacagagcaagactctgtctcaaaaaaaaaaaaaaaaaagaaaaaaaaaacggattccatgtataccccctgtagcctgtagtagcaaccagatgggcatgtcccgggccagggctcgcctatccactatcctgctgcatcctcacaagaatcctgggagataagttctattagtatcccatttgataaatatggaaatggaggctcatagaggtcaagctgcctgctcaaagtcacatggctaataagcagcagtgccaagatccgaagccaagagtgcctactctgtggcagactgtgccatcagggaccccttcgtatcacaccctgtgcagttctttcccacacccactgtggtctgtgcctggagctgctttgaccaatagtgtggtggaaatgacgctggaagattccaggccttgcccttaaataacctgcagcttctgcttcttccctcatgaaaatctggctgttggggagtcctgagcagccatgtgagatattcagctaccctgcaggaaagaccacgtggagaagagaggcccagaggctacgctgagagggaaccaactccccagtcccagtgccagttccagatgactccagcccagccacctccacctgcacctggatgagagcctgccaagcagcaaccagcaaaagaactgtccggctgagcccaggcaagccacaaaggtaacagaaactaagagtgactgggttttttgtttgtttgcctttttgagacagggtcttgctctgttgcccaggctggagtgctgtggcacgatctcggttcactgcagcctccacctctctcaggttcaagcgattctcctgcctcagcctcctgagaagctgggaccacaggtacccgctaaatttttgtatttttagtaaagaaagggttttgccatgttgcccaggctagtcgcgaactcctggcctgaagtgatccacccacctcaacctcccaaagtgctgagattacaggcatgagccactgcacctggctaagagttactacggtaagccaccaagctttggatcagatggctatgtagaaaaagaaaactgaaaccaagtccatggcctaaattcataagaatggccacagagctgagcacttctgaaaaaatgacctcagcaacctgaatgaatgatcatggtgtatctgtttcccacggccactataacaaactaccacaaatgcagtggcttaaaacagcacaaattattattattatttgagacagggtcttgctctgtcacccaggctggagtgcaggggtgcggtcacagctcactgcagcctcattctcctgggctcaagcaatcctgccgcagcctcctgagtggctaaaactataggcatgcatcaccatgccccactaattgttttttatttttagtagggacaaggtctcgctttgttgcccaggctggtcttgaacccctgggttcaagtgatcctcctgcctcgaccttctaaagtgctgggataacaggcatgaaccaccgcacctgccctaaatttattattttacagttccagaagtcagaagtctgaaatgggggccagttgtggtggctcacgcctgtaatcccagcactctgggaggccaaggcgggtggatcacctgaggtcaggagttgaagaccagctggccaacatggtgaaacccccgtctctactgataatacaaaaattagggcatgcgcctgtaatcccagctattcaggaggccaaggcaggagaatcgcttgaaaccgggatgcagaggttgcagggagctgagatcatgccactgtaatccagcctgggcgaccatgt[137 bp omitted]atggtgaaaccctatctctactaaaaatacaaaaaattagccaggtgtggtggtgggtgccaggtgtggtggtgggtgctactcaggggactgaggcaggagaatcgcttgaacccaggaggcagagattgcagtgagttgagatcgtgccactgcactgcaatctgggcaacaagaatgaaactccatccccccccccccaaaaaaaaaagtccaaaatggctttcactaggctaatctcaaggtgtccgcagggctgtgttcctttctgaagtctccagtggagaatccatctcctcggcttttccagcttccagaggctgcccgcattccttggctcatgcctcccttcctccatcttcaaggccagcggggcagcatccctcaaatcattccctctcttgcctccctctttcccttataaggacccctgtgatcacactgacctgacctgcataattcaggatcatctccccatccccaaatccttcatttgatcacatttgcaaagtcacctttgctgtgcatggtaacatattcaacaggttcttgggataaggatgtggacatctttgggggaccagtcactctactgcctactgtgtgtgataaaccagaaaaaggaccagtgcgcgccaaaggaataaacacagatgagctggaattttcctactgcccagagatatctcacagcctccctgggagcaccaaaagtgcactttgcaggcatggcctcaacctgcctaacatcaccaacctcctttacttttgggttaaaataatttaaacaaaggaattctgtgtttaaaaagatctttgcctccccaacagggtgcatcatcgatgatttatgcttctagcatgtactgttctttcctcaggcagccacagctactgctccagcctctcctgtgagacagctgggcgcagcctgctgagtcaaaagtatctcagccaaaggtacagatactggatttgctggtcagctcaggacgcctgacctgagagaaagcagggccgccagtgcaccctgggaaattccaatcaccatggctgggggccacagcaaagggcaatcagcagtgtgaagacactaatgatgtaattaaaaggtgtaaatgtaagaagccagtacattgcaatatctggtagcatctccaactcgacctgtccctaactgagctccaggtctttctgtccaacctgcccctcctccagtcggctgtctcacacccaatccatgggaaatcctgctggctctaccttgtaaacaaatctactggttattcattactaagaggaaaaggaaaggttcttgacatggttacaccttaaccaagcgatccaaatcaccatcacaaatgacagaacaaatagacctcaggagtcccctgaagggatgtccttaggaggcacctcgagtctgtggtgttcccgccaaacatgttcaacatgaatccaatcggggaagcaatcaggagactccagacatcgggacacactatcaatcagaggactggctccaatgtcaatgtcaaaaaacaagggcagggatactattctagagcagggtcagaaaactcttcctgtaaaggggcagagagtaaatattttagattttgaggccaggcgtggtggctcacgcctgtaatcctgaaactgcctttgcaaaattatgactgacacagcaaaagagatctaacttgactgactccatcttacttccaacctccaagctgtccttgttcattcctgagtgaaggctgaactaactttgggagaaacttagtttatagtttaaacaaacatggtaacagccctttcccaaagcagacctccttcttgcctggtgactagattgcctttgtaggactaacattagccacaagattagaaattatggtttaggagtcatgcagctggaggatacaagattctgaccctccctaaactgctcctaagatcagtgcttgagatattctgcagactctgcacttgatggatcagctggccccacccagatcaaaaaattggctcatctgatcttgtgcccgccctccccctcccccaccgccacccaggaactaactgagcacaagacatctctgaattcctatgatttcatctctgaccaatcagcactcctggctcactggcttcccctcacccaccaagttatccttaaaaactctgctcccgggccaggcgtggtggctcatgcctgtaatcccagcactttgggaggccaaggcgggcagatctcctgacgttgggagttagagaccagcctgatcaacatggagaaaccccatctctacttaaaatacaaaattagccgggcgtggtggcgcatgcctgtaatcccagctactcgggaggctgaggcaggagaatcacttgaacccgggaggcggaagttgtggtgagccaagatcacaccattgcactccagcctgggtgtcggagtgcgactctgtctcaaaaaataaaataaaataaaataaaacagaactctgatattgtccttctgctgcacagaaccctccagtaagtcctgttccactcagagtaaagccaaggcatttgcagtgacccacaggccccatacaaactgtccccctttcccgtcatcagtttcctctgtcctgtgtgccaggcacgctcatgcctcaggtcctgtgtgcatgcgggatcctctgggctggaacgtttcttcccccagatggcaatgctgctcgttccctccctccttggcatattttcagtgagttctccctgacaatcctatctaggcttatagccttcctttaaatactccttgttctacaaccctgatttttttcctagagcaattattgctatctaatatacttcatcttttaactattttttgagatggaatctcactctgtcacccaggctggagtgcagtggtgcaatctcggctcactgcaacctctgcctcttgggttcaagtgattctcctgcctaagcctcctaagtaactgggattacaggtgcctgccaccacacctggctaatttttgtatttttagtagagatggggtttcaccatgttgcccaggctggtctcaaactcctgacctcaagtgatgcaccagcctcagcctcccaaagtgctgggattacaggcatgagccactgggcccagccaactatttatttcatttattgtctggcttcctccacaagaatgtaaggtacctgagggcaagatgttttgctttttcctgcctgttgtatctataacatctacgtgacagccatgaccctatgccaggcactgacttaacattttatatccatttacttaatcctcaccacaacacaataaatattatttacagcataatgcatacatagtatatacacaaaataataataataataataatagtatctacctcatcataactggtgaggacccagtgccagaggctggaaggtgctgcagacaagccgtggcacaaagtacaagcccagttaatgtgaccattacataatacccaatgtacagaatcggaaattgaagctaagaggggctaaatgacgtacccaaagtcaccagtctgggtagggattcaaacctatgtcagtctgactccagaagccattttctttctttttttttttctttttttttttttgatatggagtctcgctctgtcacccaggctggagtgtagtggcacgatctcggctcactgcaacctccgcctcccatgttcaagtgattcttctgcctcagcctcccgagtagctgggattacaggcgcgtgccaccacgcccagctaatttttgtatttttagtagagaaggggtttcaccatgttggtcaggcaggtcttgaaatttgacttcgtgatctgcccaccttggcctcccaaagtgttgggattacaggcgcgagccactgcacccggcctttttttttttttttttgagacagagtttcactcttgttgcccaggctggagtgcaatggcgtgatctcggctcactgcaacctccacctcctgggttcaagcgattctcctgcctcagcctcccgagtagctgggattacaggcatgcgccaccacgtctggctaattttgtatttttagtagagacggggtttctccatgttggtgaggctggtctctaattcccgacctcaggtgatctgcctgcctcggcctcccaaagtgctgggattataggtgggaggcaccgcgcccagcacagaagcctatttatttatttatttatttatttatttatttattgagacagagtctcgctctgtcgcccaagctggagtgcagtggtgtgatcttggctcactgcaacctctgcctcccaggttcaagcaattctcctgcctcagcctcccaagtagctgggactacaggtgtgcgccaccacacctgcctaattttgtattttgagtagagacagggtttcaccatgttggccaggctggtcttgaactcctgacctcatgatccacccacctccgccttccaaagtgctgggattacaggcatgagccactgcgcccagctccagaagccattttctaaaccacaacgctaagaatgtcacagtgtttggaagacaggcagagacaggaaacaaactgggtctaggaattcagtgtccaaagtttcgcctctggcacaaatctctgcgtatgacctgagcaattaactgctgccctcaacacctccattttcccttctataaaccagaggaagtcattcctctttccggacatggggacaaaacagttgtgggggtcaaatgagatggctaacaggaaagcactttggtaactgtgaaatctaatactttcccattctaagagctgcagccccaacaaagaccccaccaaacaccgaacaaccaagaattccgggccctggaaagcaaactttaagcatccaaacttacagagggggaaaaaaagtgcactcccttaatcatgtgggctttgtgtgtgctcctccctctgccccagtgctttccttacgccttgtcctggtgttgtcctcacccttcaggtcccaattcagatgtctcctctgccaggaagccctccctgaaccccatgccatgtcaggtgcccagtgggctcccccatctcagctctgcccactgttgggggatacgtctgtcccccgcaggactaggaattccttgagggcacagattggtgctggtttggtccctgctgtttcgccagcattgccagcacaaggcctggcacagggcagaggctcacaaaataccagctaaaggaaataatgaatggatggagggatgaatggtgtgtaaccgcccaaggagttcaccttgcccgctgcctagacagagctgattcatcaagagaggagaactgcaagacaaagagtaattcacgcagagttggctgtgcgggagggtgttttgtttgtttgtttgagattgagacagtcttgctctgttgcccagactggagggcagtggtgcaatctcggatcactgcaacctctacctcctaggttcaagcaattctcctgcctcagcctcctgagtagatgagattacagatgtgcgccaccacacccagctaatttttgtattttcagtagacacgggttttcaccatgttggtcaggctggtctcgaactcctgacctcatgatccacccacctcggcctcccaaagtgctggaattacagacgtgagccaccgcgccccagccaggagtcttaccattactcaaatcagtctccctgagcattcagggagattttatttttattttattttattttttttttttgagatggattttcactctttcgcctgggctggaatgaagtgacgcgatcttggctcactgcaacctccatccccgggttcaagcgattctcatgctccagcctcccgagtagctgggattataggcgcccgccaccaagcccgcctaacttttgtatttttagtagagacggggtttgaccatgctggccaggctggttgcaaactcctgacctcaggtgctccacccccctcagccttccaaagtgctaggattacagatgcgagccaatgggcccagctggagcagagtttttttgttttttgtttttgttttgagacggagtctcggtctgtcgcccaggctggagtgtagtggtgcgatctcggtggagcagagtttttaaggataacttgatgggtgaggggaagccagtgagccaggagtgctgattggtcagagatgaaatcacagggagtcggagctgtcttcttgcgctcagtcagttcctgggttggggggccacaagatcagatgggccagtttattgatctgggtaaggccagctgatccatcaagtgcagggtctgtgaaatatctcaagcactgatcttaggagcagtttagggagggtcagaatcttgtaccctccagctgcatgactcctaaaccataatttctaatcttgtggctaatgttagtcctacaaaggcaatccagtcgccagacaagaaggaggtctgctttgggaaagggctgttaccatgtttgtttaaactataaactacaaactaaatctctcccaaagttagttcagcctttgcccaggaatgaacaaggatagcttggaggttagaagcaagatggagtaagttaacttagatctctttcgctgtgtcagtcataattttgcaaaggcggtttcagtggttctctgacccagccaatgatgctaaattcccttattttatgtcccacgtagcacaacacagatcaccttttttttttttggagacggagtcttgctccgtcacccaggctggagtacagtgttacgatctcggctcactgcaagctccgccttccgggttcacgccattctcctgcctcagcctcctgagtagctgggaccacaggcgcccagccaccacgcccggctaatttttttgtatttttagtagagatggggttt[144 bp omitted]agccctttatttctatttattattttttgagacagtcttgctgtgtcgcccaggctggagtgcaatggcacaatctaggctcactgcagcctccacctaccaggttcaagcgattcccctgcctcagcctcccaagtagctgggattacaggtgtgcgccaccacacccagctaatttttgtatttttagtacagaccgggtttcactatgttggccaggctggtctcgaactcctggcctcatgtgatccgcccgcctcggcctcccaaagtgctggtattacaggtgtgagccaccgcgccggaccttactatgccctttagatctgagctcgggcggccccctctaggcagccctgctggcctcaggtccctgggtcagccagttcctctgagctccggggctcccactttcccgaccactctgggttgacagtgatggatcaggagtatatctcccagtgctgagcaaaaaggccgcatagtctgtcaaccgaatgaaaggacggcgtatgagcgcattaatgagtacacagatgaatgtcctctctggctcaaagtccttttccggattcccaggccatgtctccagaacccagacttcacccccgaaccatgcccctaatccagacttattgactacagtaaaactgaggcacgtcgacgtcctaaacggaggatatacaagcacctcctagatcagtggggaaactgaggcacacggtgccgcttttgaaatgaagttgcccaaggacagccgggcaaaggaccccgtccggtttctcctcagcccctcccctagctcctctatcctggaaagccccgtccaaatttctcccatctctcacactattggtttaacagggcatcagtctccaagcgctctcttcctttatcggctggcatttcctactcgcgtggtggctccttgacccgccccttacgccccgccccgccctcactactgggccacccgtacgcccctctatcagaaaccccccactattggccactggactttgccggttcgggctgtgattggtcgtagacagaagtccatcccctaagcaaccacctgacaggggttggagaaaggaaaaaggttggagggaattcgggtcagactcacgttgagccggcgggaggcagatataggtcttgaagaactcgcttcggcgggcggcctccttaatacggttggcaagcggcttgctgacctgccggatgcccaagtatagcagcttcgccatagggaacgcgcccaccaccatcttggcggtctcacagggcacgcgcaaccttgctgactgggcggggcgcctcaacctcttcactcctcccccgccctctcgtggccatgcgtgcgtcagtacgtatgtacgtacgctcgagggaaacttcagaggcgcatcctgacgtcaccccgtcgacgctggcgtagcgacgtccgttcgctgaatatgcaaatatacacggaagtgaggcgggtcagggggcggtgccgttaaacggatgctggaaggcgtgtggattcccacgcccgccttggccaacgtcactgtactccttcgtgatgtcacgttccgagttggcgtccccacccaaaggaggctcttaattagtcctaattagtcctatgagccccaaatacaccttcctctgcaagctagggctctcattgggattaagaggaagccgcgcggtcatacagactttggctgggatcccagctctgccatttcctcgctgtgtaatattagatgagtggcataacctctctggacttcagtattaccgtctaccaaatgggaatcctaatagcagttgcctctttgggttgttgtgaggcttctatgctaatcttgagtgtaaaacagtggaccatgggaagtggttagaatggtgccattcatatagttaagcgctcagtaaatagcccttcttactatacaggtcatgattgcattattaatgctaaatccagcctgagggtgcatttcacccccagaagcagcgaatccaaccctttcccaagtaactgacaaggaaactgaggcccagagcagggcagggggtggcacaaggttcctgcagaggttgatagcctggcatcttggccaataaaaccatacccgttctcaagcaacccaacttccttcattaggaggtaggttccccagggagctagttcagaaataaatttaaggacatgtcccagactgtcctttcttacccagcagggagtaaaatcatataaacaatgtcaggaaggggttgagagaaattcctggatgatggagtgctgatgggtaattgagagat[135 bp omitted]catcgtgaaatcccatctccactaaaaaaaaaaaaaaatttagccgggcatggtggcgggcacctgtaatcccaggtactctggaggctgaggcaggagaatcgcttgaacctgggaggtagaggttgcagtgagccgagatcacgccgctgcactccagtcttggcgacagagcgagactccgtctcaaaaaaaaaaaaaaaaaaaaaaggaaaacaggaacagaggagtggtgtgtaggaggaaacatacattcaggacacagaatcagggggctctggacttctttggtatccagtctgactctctgagtgtcctttgtcaagctcctggcactgagggacctgcgtttcctcatctttactgatggtgctggtgtgtgtgtgaaccctgatattctgaattactaagaatgccaggattccataaaaacaaccttttccagggtcccttccacacggaaggtatgcagaaacttgggactacctaaggtccatcatccatttgggaccagcccccttcccattttacagatcgtttgagcctgggaggttgaagctgtggtgagccatgagctccactgcactccagcctaggcaacacaa[136 bp omitted]cacgatgaaaccccatctctactaaaaatacaaaaaattcgctgggcgtggtggcgcacacctgtaatcccagctactccagaggctgagacaggagaatcacttgatctcgggaggcggaggttgtagtgagccgagatcgtgccaatgcactccagcctgggtgacagagcgaggctctgtttcaaaacaaaacaaaaaaaattggccgg[131 bp omitted]tggtggcgggcgcctgtagtcccagctactcgggaggctgaggcaggagaatggcgtgaacccaggaggcggagcttgcagtgagccgagatggcgccactgcactccagcct[155 bp omitted]tctactaaaaatacaaaattagcagagcgtggtggcacatgcctgtaattccagctactcgggaggctgaggcaggagaattgcttgaacccaggaggcggaagttgcggtgagccgagatcgcgccattgcactccagcctgggcaaccaagagcgaaactcagtctcaaaaaaaaaaaaaagagagaaaagaaaaattctggccccatcacctccattcccatagctttacagcagtgggatggggtgggaagactactaggcctcccagatcccaggcctccctctcttctctagccctccagcccaccaacaccaaagccctgatttccgccatctctgtgctccctccaccccagaaaaatcattgagtgcatttttccccctattcctctcctccttcttcctttctctgagaagggttcccgggaaagtcttctgggaacctttgtgaagggagaggagggcccgggggagcggggtggtaggagggttgtgagtgaatcttcacacctcaggagtctgtttacacacccgtaaggaggaagaggagaggagaccttctctgaagggtgaggccttttcagagctgggtgcttcttcctgctctccagcctggtcatggaacagtggccattcctggtgacccctgagaccaggggagggagggcagccttggccatcctggggcatgggaacacaagcagagatggggaggggagagggaacccaagatggctccagcgctgactcaccagccatgggaccttggactggttgcctggcctctctggtgaccgccctagactagggcctgggatccttcctggaagttttttctgctcacagcccctagtcacccttttcctggaatgagtgaggtactcgtgtttcataatccctctggcccctgtgcttcttccattaaaataaatccaaggctgggcacggtggctcaagcctgtaatcccagcactttgagaggctgaggtgggaggatcacttgaggccaggatttcaagatcagcctggccaacatggagaaaccccgtctctactaaaaatacaaaaattagccaggcgtggtggtgcatgcctgtaatcccagctactcaggaagctgaggcacaagagttgcctgatcccaggaggcggaggttgcagtgagccgagatcctgacactgtactccagcttgggcaacagagcgagattctgtctcaaaataaataaataaacaaacaaaaataaaactccaaaagctgatcactgctccttgttaaatccacaaccaccacccacccggcccaactgacagcacctccctcttggactcctgcagtcacctcctcactgggc[134 bp omitted]ggtctcagcctaccaagtagctgggactacagacacataccaccatgcccggctaatttttaaaatttctgtagaaactgggtctccctatgttgcctaggctggtcccaaactcctggcctcaagcagtcctcctgcctcagcctcccaaagtgctgggattacaggcttgagccactgtgcccagccaatctcccatattctactccccactcaacagcccgtgggatactgttaatacttaagtcaaatcaccttcatcctctactgagaaccccctcatagctcccatttatctcagattaaaaggcagagtcctcactaggatttacatggccccacacgacctgctgtcccctctcttgtctcatttcccctttcctctcgtcctctctacctcctctccagccacactgccatacctgctatctttcaaaattcagacactctattattattatttgagatggagtttcgctcttgtcacccaggctggagtgcagtggcacaatctcagctcactgcaacctctgcctcccgggttcaagcgattctcctgcctcagcctcccaactagctgggattacaggcacccaccaccacgctcagctacttttttttgtattttagtagagacggggtttcaccat[137 bp omitted]tgcagttccctctgcctgaaatgctcttcccacaacagccacaaggctgagtgccgcccatgcttcaagtctttgctggaaagccacctcagcaagcccttctctgccctcctccagatcagactccaagtcatcctctgttccctcaactggctttacatagaaaaatgtccccttcccatttagcaattccaaacattacatattttttatttacttgtgtatggtgagccctgtgaaggcaaggccaggctgcctcagtcattgttgtgtccccagccccacccagcacagtgccctacataaacctctgttgaatgaatgaataaataccctttcttcttgtcccacaccttcttcccaaaccttctggcatcactcctccaggcagtctgccctgattgcccttcacttgagttctgacattctccctcttcatcctcagtcttgacttggagatcgctgtttatctagaaacttagaattgcggtcttatgttccctggcctgtatgaccaggggctttgcaaacataatgactctatatcggctgcatttctccttccactttcccccgagtcacagacttttatccacttgttggaaaaaaaaaaatctaaccttctctatttgtctttattttctggaaaccaaatgtttgacttaatttatctggccagacatggcggctcacatctctaatctgagcactttgggaggccaaggcaggaggatctcttgagcccaggagttcaagatcagcctgggaaacatagtgagactccatttctacaaaaagtacaaaaattagccaggcatggtggctcacatttgtggtcccagctactcgggaggctgatgtgggaagatcgctggagagcccaggaggtggaggctgcagtgagccacgactgcactactgcactccagcctgggcaacacagtgagaccctgtctccaaaaaaatatatttactcatctcctccttcaggaggccctccacaatcgccaaactgtgatgggatctgggagcacaaaggttgaccagtgacacaccaacctcactcttcctaagttcttgtattcttatgaatattaacacagccctttttccatacaatttgcatacaccagaccaggagagaagggactgtgggatgagaggggaaaactggggattctgtgccactcggggttcattgtgctggcggcagcatcttcagctgcacctggtccccctgggagggcggagtggccgcccagctgccagtcatggctttggctgtgctgttcctcttggaggtgagtggggtctccagggtgagcgaggcattggccatctcctggggcttgtcgctggccagaaagcggagcaggttgtgcagggccttggccacatcgctgcgggcgccctcgttgaccaggcagtagaggatggggtccgccacacagttgaggctggtgaaagccagtgagctgtggtatgcagaaaagacgcgctcctcgaagccgcagtcccaggggcggcccaggtagatggcgctgcgggacagcaagagcacgtgatagggcgcaaagcagaccagcacgatggcgatgaggctgagggccagccgcttgatcttggccttctcctggcgctcggtggacacgctgccccgcacggcccgcaggatgccccggtacgacagcagcatgagcgcccacgggaagaggaagcccacgaacacccgatagaggttcatccaggccacccagccttccatggggaacttctcaaagcagaaggtgtggttgtagcggtctcggaagagctcgtcatggaacaggggcgccgagttggcgcccagctccgtggcccagaccacggagctcacggccacggcggtcttgacgcggcgc
